(19) United States
(12) Patent Application Publication
(10) Pub. No.: US 2020/0061113 A1
(43) Pub. Date: Feb. 27, 2020

(54) CHIMERIC ANTIGEN RECEPTOR THERAPY CHARACTERIZATION ASSAYS AND USES THEREOF

(71) Applicants: Novartis AG, Basel (CH); The Trustees of the University of Pennsylvania, Philadelphia, PA (US)

(72) Inventors: Sadik Kassim, Milton, MA (US); Qiong Xue, Westwood, MA (US)

(21) Appl. No.: 16/381,784

(22) Filed: Apr. 11, 2019

Related U.S. Application Data
(60) Provisional application No. 62/656,755, filed on Apr. 12, 2018.

(51) Int. Cl. A61K 35/17; G01N 33/50; C12N 5/0783; A61P 35/02; C07K 16/28

(52) U.S. Cl. CPC A61K 35/17; G01N 33/5005; C12N 5/0636; A61P 35/02; C07K 2319/33; G01N 2800/52; C12N 2501/999; C07K 2319/30; C07K 16/2803

(57) ABSTRACT

In vitro CART characterization assays and methods of using them are disclosed.

### RELATED APPLICATIONS

[0001] This application claims priority to U.S. Provisional Application No. 62/656,755 filed Apr. 12, 2018, the entire contents of which are incorporated herein by reference.

### SEQUENCE LISTING

[0002] The instant application contains a Sequence Listing which has been submitted electronically in ASCII format and is hereby incorporated by reference in its entirety. Said ASCII copy, created on Aug. 9, 2019, is named N2067-712210_SL.txt and is 904,192 bytes in size.

### FIELD OF THE INVENTION

[0003] The invention relates to in vitro CART characterization assays and uses thereof.

### BACKGROUND OF THE INVENTION

[0004] Many patients with B cell malignancies are incurable with standard therapy. In addition, traditional treatment options often have serious side effects. Attempts have been made in cancer immunotherapy, however, several obstacles render the goal of clinical effectiveness difficult to achieve. Although hundreds of so-called tumor antigens have been identified, these are generally derived from self and thus are poorly immunogenic. Furthermore, tumors use several mechanisms to render themselves hostile to the initiation and propagation of immune attack.

[0005] Recent developments using chimeric antigen receptor (CAR) modified autologous T cell (CART) therapy, which relies on redirecting T cells to a suitable cell-surface molecule on cancer cells such as B cell malignancies, show promising results in harnessing the power of the immune system to treat B cell malignancies and other cancers (see, e.g., Sadelain et al., CANCER DISCOVERY 3:388-398 (2013)). For example, the clinical results of a CART that binds to CD19 (i.e., “CTL019”) have shown promise in establishing complete remissions in patients suffering with chronic lymphocytic leukemia (CLL), as well as in childhood acute lymphocytic leukemia (ALL) (see, e.g., Kalos et al., SCI TRANSL MED 3:95ra73 (2011), Porter et al., NEJM 365:725-733 (2011), Grupp et al., NEJM 368:1509-1518 (2013)).

[0006] CART cells are autologous T cells genetically modified to express a chimeric antigen receptor (CAR) which combines an extracellular antigen recognition domain, an intracellular domain (e.g., intracellular domain of CD3 zeta chain) with a costimulatory signaling molecule. Upon engagement of a tumor antigen to the extracellular antigen recognition domain, the intracellular T-cell signaling domains induce T-cell activation. The activated T cells are able to expand, release cytokines and kill tumor cells in an antigen-dependent manner. According to the mode of action, a series of functional bioassays are used to evaluate the functionality of a CAR T product, including IFN-γ release assay and cytotoxicity/killing assay (both Non-Radioactive killing assay and radioactive 51Cr release assay). IFN-γ assay measures the amount of IFN-γ released upon CAR stimulation. Briefly, CART cells are co-cultured with target cells expressing the tumor antigen and IFN-γ level is measured in the supernatants by ELISA (Kochenderfer J N, et al. Blood 116, 4099-4102 (2010); Porter D L et al. N Engl J Med 365, 725-733 (2011)). Cytotoxicity/killing assays measures the killing capability of CART cells on antigen-specific tumor cells. Briefly, CART cells are incubated with target cells at various effector to target ratios, and the cytotoxic effect of CART cells is then calculated based on the level of target cell lysis (Jensen M C, et al. Biol Blood Marrow Transplant 16, 1245-1256 (2010); Savoldo B, et al. J Clin Invest 121, 1822-1826 (2011); Brentjens R, et al. Mol Ther 18, 666-668 (2010)).

[0007] Despite the extensive use of IFN-γ release and cytotoxicity/killing assays as functional characterization release assays, little evidence indicates a correlation between the in vitro readout from these assays with clinical outcome of CART therapy. This lack of correlation represents a hurdle in the scale out of personalized cellular immunotherapies and hinders effective clinical management of patients. A need, therefore, exists for in vitro CART characterization assays, such as potency assays, that correlate with clinical efficacy and safety parameters.

### SUMMARY OF THE INVENTION

[0008] The present disclosure provides, methods of treating a subject having a cancer comprising acquiring a signature of a sample of a manufactured CAR-expressing cell composition, and responsive to said signature administering to the subject a CAR expressing product. Provided herein, inter alia, are in vitro CART cell characterization assays, such as potency assays, that correlate with clinical efficacy and safety parameters for CART cell therapy. Also provided herein are in vitro CART cell characterization assays which provide a single cell signature (e.g., the number, frequency, or percentage of polyfunctional cells (e.g., cells expressing 2, 3, 4, 5, 6, or more proteins, e.g., cytokines)) of CART cells in a sample. Accordingly, the disclosure provides, a method of evaluating a subject or monitoring the effectiveness of a CAR-expressing cell therapy in a subject. The disclosure also provides: a method of manufacturing, and optimizing a manufacturing process of a manufactured CAR-expressing cell composition; a method of determining a therapeutically effective dose of a manufactured CAR-expressing cell composition; and a method of evaluating the potency of a manufactured CAR-expressing cell composition.

[0009] In one aspect, provided herein is a method of treating a subject having cancer, comprising:

[0010] acquiring a signature of a sample of a manufactured CAR-expressing cell composition (e.g., a CAR-expressing cell product), wherein the signature comprises the number, frequency, and/or percentage of one or more of the following cell populations in the sample, wherein each cell of the cell population expresses: IL2; IFNγ; IL17A; TNF; IL8; CD107a; IL2 and IFNγ; IL2 and IL17A; IL2 and TNF; IL2 and IL8; IL2 and CD107a; IFNγ and IL17A; IFNγ and TNF; IFN and IL8; IFNγ and CD107a; IL17A and TNF; IL17A and IL8; IL17A and CD107a; TNF and IL8; TNF and CD107a; IL8 and CD107a; IL2, IFNγ, and IL17A; IL2, IFNγ, and TNF; IL2, IFNγ, and IL8; IL2, IFNγ, and CD107a; IL2, IL17A, and TNF; IL2, IL17A, and IL8; IL2, IL17A, and CD107a; IL2, TNF, and IL8; IL2, TNF, and CD107a; IL2, IL8, and CD107a; IFNγ, IL17A, and TNF; IFNγ, IL17A, and IL8; IFNγ, IL17A, and CD107a; IFNγ, TNF, and IL8; IFNγ, TNF, and CD107a; IFNγ, IL8, and CD107a; IL17A, TNF, and IL8; IL17A, TNF, and CD107a; IL17A, IL8, and CD107a; TNF, IL8, and CD107a; IL2, IFNγ, IL17A, and TNF; IL2, IFNγ, IL17A, and IL8; IL2, IFNγ, IL17A, and CD107a; IL2, IFNγ, TNF, and IL8; IL2, IFNγ, TNF, and CD107a; IL2, IFNγ, IL8, and CD107a; IL2, IL17A, TNF, and IL8; IL2, IL17A, TNF, and CD107a; IL2, IL17A, IL8, and CD107a; IL2, TNF, IL8, and CD107a; IFNγ, IL17A, TNF, and IL8; IFNγ, IL17A, TNF, and CD107a; IFNγ, IL17A, IL8, and CD107a; IFNγ, TNF, IL8, and CD107a; IL17A, TNF, IL8, and CD107a; IL2, IFNγ, IL17A, TNF, and IL8; IL2, IFNγ, IL17A, TNF, and CD107a; IL2, IFNγ, IL17A, IL8, and CD107a; IL2, IFNγ, TNF, IL8, and CD107a; IL2, IFNγ, IL17A, TNF, IL8, and CD107a; IL2, IL17A, TNF, IL8, and CD107a; or IFNγ, IL17A, TNF, IL8, and CD107a; wherein an increase in the number, frequency, and/or percentage of one or more of the cell populations is indicative of increased potency of the CAR-expressing cell product (e.g., relative to a control), and

[0011] responsive to said signature, performing one, two, or three of:

[0012] administering the CAR-expressing cell product;

[0013] determining the dosing regimen (e.g., altered dose, altered schedule, or altered time) of the CAR-expressing cell product and administering the CAR-expressing cell product at the determined dose;

[0014] administering an altered dosing regimen (e.g., altered dose, altered schedule, or altered time) of the CAR-expressing cell product; or modifying a manufacturing process of a CAR-expressing cell product, e.g., enriching for CAR-T cells with a preselected signature.

[0015] In another aspect, the disclosure provides a method of optimizing a manufacturing process of a manufactured CAR-expressing cell composition (e.g., a CAR-expressing cell product), comprising:

[0016] (a) acquiring a sample of a manufactured CAR-expressing cell composition (e.g., the CAR-expressing cell product);

[0017] (b) activating the CAR-expressing cells in the sample in vitro to produce a sample of activated CAR-expressing cells;

[0018] (c) evaluating the potency of the sample of activated CAR-expressing cells by determining the number, frequency, and/or percentage of one or more of the following cell populations in the sample, wherein each cell of the cell population expresses: IL2; IFNγ; IL17A; TNF; IL8; CD107a; IL2 and IFNγ; IL2 and IL17A; IL2 and TNF; IL2 and IL8; IL2 and CD107a; IFNγ and IL17A; IFNγ and TNF; IFN and IL8; IFNγ and CD107a; IL17A and TNF; IL17A and IL8; IL17A and CD107a; TNF and IL8; TNF and CD107a; IL8 and CD107a; IL2, IFNγ, and IL17A; IL2, IFNγ, and TNF; IL2, IFNγ, and IL8; IL2, IFNγ, and CD107a; IL2, IL17A, and TNF; IL2, IL17A, and IL8; IL2, IL17A, and CD107a; IL2, TNF, and IL8; IL2, TNF, and CD107a; IL2, IL8, and CD107a; IFNγ, IL17A, and TNF; IFNγ, IL17A, and IL8; IFNγ, IL17A, and CD107a; IFNγ, TNF, and IL8; IFNγ, TNF, and CD107a; IFNγ, IL8, and CD107a; IL17A, TNF, and IL8; IL17A, TNF, and CD107a; IL17A, IL8, and CD107a; TNF, IL8, and CD107a; IL2, IFNγ, IL17A, and TNF; IL2, IFNγ, IL17A, and IL8; IL2, IFNγ, IL17A, and CD107a; IL2, IFNγ, TNF, and IL8; IL2, IFNγ, TNF, and CD107a; IL2, IFNγ, IL8, and CD107a; IL2, IL17A, TNF, and IL8; IL2, IL17A, TNF, and CD107a; IL2, IL17A, IL8, and CD107a; IL2, TNF, IL8, and CD107a; IFNγ, IL17A, TNF, and IL8; IFNγ, IL17A, TNF, and CD107a; IFNγ, IL17A, IL8, and CD107a; IFNγ, TNF, IL8, and CD107a; IL17A, TNF, IL8, and CD107a; IL2, IFNγ, IL17A, TNF, and IL8; IL2, IFNγ, IL17A, TNF, and CD107a; IL2, IFNγ, IL17A, IL8, and CD107a; IL2, IFNγ, TNF, IL8, and CD107a; IL2, IFNγ, IL17A, TNF, IL8, and CD107a; IL2, IL17A, TNF, IL8, and CD107a; or IFNγ, IL17A, TNF, IL8, or CD107a; and

[0019] (d) responsive to said determination modifying a manufacturing process of a the CAR-expressing cell product, e.g., enriching for CAR-T cells with a preselected signature.

[0020] In yet another aspect, provided herein is a method of determining a therapeutically effective dose of a manufactured CAR-expressing cell composition (e.g., a CAR-expressing cell product), comprising:

[0021] (a) acquiring a sample of a manufactured CAR-expressing cell composition (e.g., the CAR-expressing cell product);

[0022] (b) activating the CAR-expressing cells in the sample in vitro to produce a sample of activated CAR-expressing cells;

[0023] (c) evaluating the potency of the sample of activated CAR-expressing cells by determining the number, frequency, and/or percentage of one or more of the following cell populations in the sample, wherein each cell of the cell population expresses: IL2; IFNγ; IL17A; TNF; IL8; CD107a; IL2 and IFNγ; IL2 and IL17A; IL2 and TNF; IL2 and IL8; IL2 and CD107a; IFNγ and IL17A; IFNγ and TNF; IFN and IL8; IFNγ and CD107a; IL17A and TNF; IL17A and IL8; IL17A and CD107a; TNF and IL8; TNF and CD107a; IL8 and CD107a; IL2, IFNγ, and IL17A; IL2, IFNγ, and TNF; IL2, IFNγ, and IL8; IL2, IFNγ, and CD107a; IL2, IL17A, and TNF; IL2, IL17A, and IL8; IL2, IL17A, and CD107a; IL2, TNF, and IL8; IL2, TNF, and CD107a; IL2, IL8, and CD107a; IFNγ, IL17A, and TNF; IFNγ, IL17A, and IL8; IFNγ, IL17A, and CD107a; IFNγ, TNF, and IL8; IFNγ, TNF, and CD107a; IFNγ, IL8, and CD107a; IL17A, TNF, and IL8; IL17A, TNF, and CD107a; IL17A, IL8, and CD107a; TNF, IL8, and CD107a; IL2, IFNγ, IL17A, and TNF; IL2, IFNγ, IL17A, and IL8; IL2, IFNγ, IL17A, and CD107a; IL2, IFNγ, TNF, and IL8; IL2, IFNγ, TNF, and CD107a; IL2, IFNγ, IL8, and CD107a; IL2, IL17A, TNF, and IL8; IL2, IL17A, TNF, and CD107a; IL2, IL17A, IL8, and CD107a; IL2, TNF, IL8, and CD107a; IFNγ, IL17A, TNF, and IL8; IFNγ, IL17A, TNF, and CD107a; IFNγ, IL17A, IL8, and CD107a; IFNγ, TNF, IL8, and CD107a; IL17A, TNF, IL8, and CD107a; IL2, IFNγ, IL17A, TNF, and IL8; IL2, IFNγ, IL17A, TNF, and CD107a; IL2, IFNγ, IL17A, IL8, and CD107a; IL2, IFNγ, TNF, IL8, and CD107a; IL2, IFNγ, IL17A, TNF, IL8, and CD107a; IL2, IL17A, TNF, IL8, and CD107a; or IFNγ, IL17A, TNF, IL8, or CD107a; and

[0024] (d) based on said determination administering an altered dosing regimen (e.g., altered dose, altered schedule, altered time) of the CAR-expressing cell product.

[0025] In one aspect, the disclosure provides a method of evaluating the potency of a manufactured CAR-expressing cell composition (e.g., a CAR-expressing cell product), comprising acquiring a signature of a sample of the manufactured CAR-expressing cell composition wherein the signature comprises the number, frequency, and/or percentage of one or more of the following cell populations in the sample, wherein each cell of the cell population expresses: IL2; IFNγ; IL17A; TNF; IL8; CD107a; IL2 and IFNγ; IL2 and IL17A; IL2 and TNF; IL2 and IL8; IL2 and CD107a; IFNγ and IL17A; IFNγ and TNF; IFN and IL8; IFNγ and CD107a; IL17A and TNF; IL17A and IL8; IL17A and CD107a; TNF and IL8; TNF and CD107a; IL8 and CD107a; IL2, IFNγ, and IL17A; IL2, IFNγ, and TNF; IL2, IFNγ, and IL8; IL2, IFNγ, and CD107a; IL2, IL17A, and TNF; IL2, IL17A, and IL8; IL2, IL17A, and CD107a; IL2, TNF, and IL8; IL2, TNF, and CD107a; IL2, IL8, and CD107a; IFNγ, IL17A, and TNF; IFNγ, IL17A, and IL8; IFNγ, IL17A, and CD107a; IFNγ, TNF, and IL8; IFNγ, TNF, and CD107a; IFNγ, IL8, and CD107a; IL17A, TNF, and IL8; IL17A, TNF, and CD107a; IL17A, IL8, and CD107a; TNF, IL8, and CD107a; IL2, IFNγ, IL17A, and TNF; IL2, IFNγ, IL17A, and IL8; IL2, IFNγ, IL17A, and CD107a; IL2, IFNγ, TNF, and IL8; IL2, IFNγ, TNF, and CD107a; IL2, IFNγ, IL8, and CD107a; IL2, IL17A, TNF, and IL8; IL2, IL17A, TNF, and CD107a; IL2, IL17A, IL8, and CD107a; IL2, TNF, IL8, and CD107a; IFNγ, IL17A, TNF, and IL8; IFNγ, IL17A, TNF, and CD107a; IFNγ, IL17A, IL8, and CD107a; IFNγ, TNF, IL8, and CD107a; IL17A, TNF, IL8, and CD107a; IL2, IFNγ, IL17A, TNF, and IL8; IL2, IFNγ, IL17A, TNF, and CD107a; IL2, IFNγ, IL17A, IL8, and CD107a; IL2, IFNγ, TNF, IL8, and CD107a; IL2, IFNγ, IL17A, TNF, IL8, and CD107a; IL2, IL17A, TNF, IL8, and CD107a; or IFNγ, IL17A, TNF, IL8, or CD107a.

[0026] In another aspect, disclosed herein is a method of evaluating a subject, e.g., evaluating or monitoring the effectiveness of a CAR-expressing cell therapy in a subject, having a cancer, comprising:

[0027] acquiring a signature of a sample of a manufactured CAR-expressing cell composition (e.g., a CAR-expressing cell product), wherein the signature comprises the number, frequency, and/or percentage of one or more of the following cell populations in the sample, wherein each cell of the cell population expresses: IL2; IFNγ; IL17A; TNF; IL8; CD107a; IL2 and IFNγ; IL2 and IL17A; IL2 and TNF; IL2 and IL8; IL2 and CD107a; IFNγ and IL17A; IFNγ and TNF; IFN and IL8; IFNγ and CD107a; IL17A and TNF; IL17A and IL8; IL17A and CD107a; TNF and IL8; TNF and CD107a; IL8 and CD107a; IL2, IFNγ, and IL17A; IL2, IFNγ, and TNF; IL2, IFNγ, and IL8; IL2, IFNγ, and CD107a; IL2, IL17A, and TNF; IL2, IL17A, and IL8; IL2, IL17A, and CD107a; IL2, TNF, and IL8; IL2, TNF, and CD107a; IL2, IL8, and CD107a; IFNγ, IL17A, and TNF; IFNγ, IL17A, and IL8; IFNγ, IL17A, and CD107a; IFNγ, TNF, and IL8; IFNγ, TNF, and CD107a; IFNγ, IL8, and CD107a; IL17A, TNF, and IL8; IL17A, TNF, and CD107a; IL17A, IL8, and CD107a; TNF, IL8, and CD107a; IL2, IFNγ, IL17A, and TNF; IL2, IFNγ, IL17A, and IL8; IL2, IFNγ, IL17A, and CD107a; IL2, IFNγ, TNF, and IL8; IL2, IFNγ, TNF, and CD107a; IL2, IFNγ, IL8, and CD107a; IL2, IL17A, TNF, and IL8; IL2, IL17A, TNF, and CD107a; IL2, IL17A, IL8, and CD107a; IL2, TNF, IL8, and CD107a; IFNγ, IL17A, TNF, and IL8; IFNγ, IL17A, TNF, and CD107a; IFNγ, IL17A, IL8, and CD107a; IFNγ, TNF, IL8, and CD107a; IL17A, TNF, IL8, and CD107a; IL2, IFNγ, IL17A, TNF, and IL8; IL2, IFNγ, IL17A, TNF, and CD107a; IL2, IFNγ, IL17A, IL8, and CD107a; IL2, IFNγ, TNF, IL8, and CD107a; IL2, IFNγ, IL17A, TNF, IL8, and CD107a; IL2, IL17A, TNF, IL8, and CD107a; or IFNγ, IL17A, TNF, IL8, or CD107a;

[0028] and wherein an increase in the number, frequency, and/or percentage of one or more of the cell populations is indicative of the subject's responsiveness to the CAR-expressing cell therapy (e.g., relative to a control).

[0029] In an additional aspect, the disclosure provides a method of manufacturing a CAR-expressing cell composition (e.g., a CAR-expressing cell product), comprising evaluating the potency of the sample of activated CAR-expressing cells by determining the number, frequency, and/or percentage of one or more of cell population comprising a protein signature (e.g., a protein signature described herein), comprising
[0030] (a) acquiring a sample of a manufactured CAR-expressing cell composition (e.g., the CAR-expressing cell product);
[0031] (b) activating the CAR-expressing cells in the sample in vitro (e.g., by culturing the CAR-expressing cells with an activating agent (e.g., an activating agent described herein, e.g., anti-ID beads)),
[0032] (c) culturing the CAR-expressing cells in the presence of a protein transport inhibitor (e.g., monensin and/or brefeldin A),
[0033] (d) determining for each cell of the population the intracellular level of each protein comprising the signature (e.g., using an intracellular protein stain), and
[0034] (e) determining the number, frequency, and/or percentage of one or more of cell population comprising a protein signature (e.g., a protein signature described herein),
[0035] to thereby manufacturing a CAR-expressing cell composition (e.g., a CAR-expressing cell product).

[0036] In some embodiments of any of the methods disclosed herein, the signature comprises the number, frequency, and/or percentage of one or more of the following cell populations in the sample, wherein each cell of the cell population expresses: IL2 and IFNγ; IL2 and IL17A; IL2 and TNF; IL2 and IL8; IL2 and CD107a; IFNγ and IL17A; IFNγ and TNF; IFN and IL8; IFNγ and CD107a; IL17A and TNF; IL17A and IL8; IL17A and CD107a; TNF and IL8; TNF and CD107a; or IL8 and CD107a. In some embodiments, each cell of the cell population expresses: IL2, IFNγ, and IL17A; IL2, IFNγ, and TNF; IL2, IFNγ, and IL8; IL2, IFNγ, and CD107a; IL2, IL17A, and TNF; IL2, IL17A, and IL8; IL2, IL17A, and CD107a; IL2, TNF, and IL8; IL2, TNF, and CD107a; IL2, IL8, and CD107a; IFNγ, IL17A, and TNF; IFNγ, IL17A, and IL8; IFNγ, IL17A, and CD107a; IFNγ, TNF, and IL8; IFNγ, TNF, and CD107a; IFNγ, IL8, and CD107a; IL17A, TNF, and IL8; IL17A, TNF, and CD107a; IL17A, IL8, and CD107a; or TNF, IL8, and CD107a. In some embodiments, each cell of the cell population expresses: IL2, IFNγ, IL17A, TNF, and IL8; IL2, IFNγ, IL17A, TNF, and CD107a; IL2, IFNγ, IL17A, IL8, and CD107a; IL2, IFNγ, TNF, IL8, and CD107a; IL2, IL17A, TNF, IL8, and CD107a; or IFNγ, IL17A, TNF, IL8, and CD107a. In some embodiments, each cell of the cell population expresses: IL2, IFNγ, IL17A, TNF, IL8, and CD107a.

[0037] In some embodiments of any of the methods disclosed herein, the signature comprises the number, frequency, and/or percentage of CD3+, CD4+, CD8+, CD3+/CD4+, CD3+/CD4+, or CD3+/CD4+ and CD3+/CD8+, live CD3+, live CD4+, live CD8+, live CD3+/CD4+, live CD3+/CD4+, or live CD3+/CD4+ and live CD3+/CD8+ cells in the sample which express: IL2; IFNγ; IL17A; TNF; IL8; CD107a; IL2 and IFNγ; IL2 and IL17A; IL2 and TNF; IL2 and IL8; IL2 and CD107a; IFNγ and IL17A; IFNγ and TNF; IFN and IL8; IFNγ and CD107a; IL17A and TNF; IL17A and IL8; IL17A and CD107a; TNF and IL8; TNF and CD107a; IL8 and CD107a; IL2, IFNγ, and IL17A; IL2, IFNγ, and TNF; IL2, IFNγ, and IL8; IL2, IFNγ, and CD107a; IL2, IL17A, and TNF; IL2, IL17A, and IL8; IL2, IL17A, and CD107a; IL2, TNF, and IL8; IL2, TNF, and CD107a; IL2, IL8, and CD107a; IFNγ, IL17A, and TNF; IFNγ, IL17A, and IL8; IFNγ, IL17A, and CD107a; IFNγ, TNF, and IL8; IFNγ, TNF, and CD107a; IFNγ, IL8, and CD107a; IL17A, TNF, and IL8; IL17A, TNF, and CD107a; IL17A, IL8, and CD107a; TNF, IL8, and CD107a; IL2, IFNγ, IL17A, and TNF; IL2, IFNγ, IL17A, and IL8; IL2, IFNγ, IL17A, and CD107a; IL2, IFNγ, TNF, and IL8; IL2, IFNγ, TNF, and CD107a; IL2, IFNγ, IL8, and CD107a; IL2, IL17A, TNF, and IL8; IL2, IL17A, TNF, and CD107a; IL2, IL17A, IL8, and CD107a; IL2, TNF, IL8, and CD107a; IFNγ, IL17A, TNF, and IL8; IFNγ, IL17A, TNF, and CD107a; IFNγ, IL17A, IL8, and CD107a; IFNγ, TNF, IL8, and CD107a; IL17A, TNF, IL8, and CD107a; IL2, IFNγ, IL17A, TNF, and IL8; IL2, IFNγ, IL17A, TNF, and CD107a; IL2, IFNγ, IL17A, IL8, and CD107a; IL2, IFNγ, TNF, IL8, and CD107a; IL2, IFNγ, IL17A, TNF, IL8, and CD107a; IL2, IL17A, TNF, IL8, and CD107a; or IFNγ, IL17A, TNF, IL8, and CD107a.

[0038] In some embodiments, any of the methods disclosed herein comprise determining the intracellular level of each protein comprising the signature (e.g., using intracellular protein stain).

[0039] In some embodiments, any of the methods disclosed herein comprise:

[0040] activating the CAR-expressing cells in the sample in vitro, and

[0041] culturing the CAR-expressing cells in the presence of one or more protein transport inhibitor (e.g., monensin and/or brefeldin A).

[0042] In some embodiments, activating comprises culturing the CAR-expressing cells with an activating agent (e.g., an activating agent described herein, e.g., anti-idiotypic (ID) beads).

[0043] In some embodiments of any of the methods disclosed herein, the signature is determined using fluorescence-activated cell sorting (FACS).

[0044] In some embodiments, any of the methods disclosed herein comprise:

[0045] activating the CAR-expressing cells in the sample in vitro (e.g., by culturing the CAR-expressing cells with an activating agent (e.g., an activating agent described herein, e.g., anti-ID beads)),

[0046] culturing the CAR-expressing cells in the presence of a protein transport inhibitor (e.g., monensin and/or brefeldin A), and

[0047] determining the intracellular level of each protein comprising the signature (e.g., using intracellular protein stain), to thereby acquire the signature.

[0048] In some embodiments of any of the methods disclosed herein, administering an altered dosing regimen comprises administering an altered dose of the CAR-expressing cell product relative to a previous administration of a CAR-expressing cell product to the subject, or relative to a previous determination of a dose of the CAR-expressing cell product. In some embodiments, the altered dose comprises an increased or decreased dose relative to a previous administration of a CAR-expressing cell product to the subject or relative to a previous determination of a dose of the CAR-expressing cell product.

[0049] In some embodiments of any of the methods disclosed herein, administering an altered dosing regimen comprises administering the CAR-expressing cell product on an altered schedule relative to a previous administration of a CAR-expressing cell product to the subject or relative to a previous determination of a dose of the CAR-expressing cell product.

[0050] In some embodiments of any of the methods disclosed herein, the preselected signature comprises the number, frequency, and/or percentage of one of the following cell populations in the sample, wherein each cell of the cell population expresses: IL2; IFNγ; IL17A; TNF; IL8; CD107a; IL2 and IFNγ; IL2 and IL17A; IL2 and TNF; IL2 and IL8; IL2 and CD107a; IFNγ and IL17A; IFNγ and TNF; IFN and IL8; IFNγ and CD107a; IL17A and TNF; IL17A and IL8; IL17A and CD107a; TNF and IL8; TNF and CD107a; IL8 and CD107a; IL2, IFNγ, and IL17A; IL2, IFNγ, and TNF; IL2, IFNγ, and IL8; IL2, IFNγ, and CD107a; IL2, IL17A, and TNF; IL2, IL17A, and IL8; IL2, IL17A, and CD107a; IL2, TNF, and IL8; IL2, TNF, and CD107a; IL2, IL8, and CD107a; IFNγ, IL17A, and TNF; IFNγ, IL17A, and IL8; IFNγ, IL17A, and CD107a; IFNγ, TNF, and IL8; IFNγ, TNF, and CD107a; IFNγ, IL8, and CD107a; IL17A, TNF, and IL8; IL17A, TNF, and CD107a; IL17A, IL8, and CD107a; TNF, IL8, and CD107a; IL2, IFNγ, IL17A, and TNF; IL2, IFNγ, IL17A, and IL8; IL2, IFNγ, IL17A, and CD107a; IL2, IFNγ, TNF, and IL8; IL2, IFNγ, TNF, and CD107a; IL2, IFNγ, IL8, and CD107a; IL2, IL17A, TNF, and IL8; IL2, IL17A, TNF, and CD107a; IL2, IL17A, IL8, and CD107a; IL2, TNF, IL8, and CD107a; IFNγ, IL17A, TNF, and IL8; IFNγ, IL17A, TNF, and CD107a; IFNγ, IL17A, IL8, and CD107a; IFNγ, TNF, IL8, and CD107a; IL17A, TNF, IL8, and CD107a; IL2, IFNγ, IL17A, TNF, and IL8; IL2, IFNγ, IL17A, TNF, and CD107a; IL2, IFNγ, IL17A, IL8, and CD107a; IL2, IFNγ, TNF, IL8, and CD107a; IL2, IFNγ, IL17A, TNF, IL8, and CD107a; IL2, IL17A, TNF, IL8, and CD107a; or IFNγ, IL17A, TNF, IL8, and CD107a.

[0051] In some embodiments of any of the methods disclosed herein, the CAR-expressing cell therapy comprises a plurality of CAR-expressing immune effector cells.

[0052] In some embodiments of any of the methods disclosed herein, the measure of the signature is obtained from an apheresis sample acquired from the subject. In some embodiments, the apheresis sample is evaluated prior to infusion or re-infusion.

[0053] In some embodiments of any of the methods disclosed herein, the manufactured CAR-expressing cell composition (e.g., a CAR-expressing cell product), is a CAR-expressing cell composition as described herein. In some embodiments of any of the methods disclosed herein, the manufactured CAR-expressing cell composition (e.g., a CAR-expressing cell product) is a CD19 CAR-expressing cell composition (e.g., a CD19-CAR-expressing cell product described herein, e.g., CTL019). In some embodiments of any of the methods disclosed herein, the manufactured CAR-expressing cell composition (e.g., a CAR-expressing cell product) is a BCMA CAR-expressing cell composition (e.g., a BCMA-CAR-expressing cell product described herein).

[0054] In some embodiments of any of the methods disclosed herein, the signature is determined prior to, during, or after administering the manufactured CAR-expressing cell composition (e.g., a CAR-expressing cell product) to the subject.

[0055] In some embodiments of any of the methods disclosed herein, the cancer is a hematological cancer. In some embodiments, the hematological cancer is chosen from leukemia or lymphoma. In some embodiments, the hematological cancer is chosen from: B-cell acute lymphocytic leukemia (B-ALL), T-cell acute lymphocytic leukemia (T-ALL), acute lymphocytic leukemia (ALL) (e.g., pediatric ALL), chronic myelogenous leukemia (CML), chronic lymphocytic leukemia (CLL), B cell promyelocytic leukemia, blastic plasmacytoid dendritic cell neoplasm, Burkitt's lymphoma, diffuse large B cell lymphoma, follicular lymphoma, hairy cell leukemia, small cell- or a large cell-follicular lymphoma, malignant lymphoproliferative conditions, MALT lymphoma, mantle cell lymphoma, marginal zone lymphoma, multiple myeloma, myelodysplasia and myelodysplastic syndrome, non-Hodgkin lymphoma, Hodgkin lymphoma, plasmablastic lymphoma, plasmacytoid dendritic cell neoplasm, or Waldenstrom macroglobulinemia. In some embodiments, the hematologic cancer is chosen from BALL, MCL, CLL, ALL, -cell lymphoma, Follicular Lymphoma, NHL, Hodgkin lymphoma, DLBCL, or multiple myeloma. In some embodiments, the hematologic cancer is pediatric ALL.

[0056] In some embodiments of any of the methods disclosed herein, the subject is a human patient.

### BRIEF DESCRIPTION OF THE DRAWINGS

[0057] FIG. 1 depicts an exemplary plate map for an intracellular cytokine stain (ISC) co-culture assay.

[0058] FIG. 2 depicts an exemplary automatic fluorescence-activated cell sorting (FACS) analysis using R script, specifically gating of lymphocytes, live CD3, CD4 and CD8 cell populations.

[0059] FIG. 3 depicts an exemplary automatic FACS analysis using R script, specifically gating of IL2, IFNγ, IL17A, TNFα, IL8, and CD107a in live CD3 cell populations.

[0060] FIG. 4 depicts an exemplary automatic FACS analysis using R script, specifically gating of IL2, IFNγ, IL17A, TNFα, IL8, and CD107a in CD4+ cell populations.

[0061] FIG. 5 depicts an exemplary automatic FACS analysis using R script, specifically gating of IL2, IFNγ, IL17A, TNFα, IL8, and CD107a in CD8+ cell populations.

[0062] FIG. 6 depicts the correlation of the percent of CD8+ cells with any protein production with in vivo CART cell expansion. FIG. 6 shows that the percent of CD8+ T cells with any protein production negatively correlates with in vivo CART cell expansion. The data presented in FIG. 6 is based on Pearson correlative studies using Cmax data from 20 patients, AUC0-28 and AUC0-84 data from 18 patients, with significant negative correlation observed between % Protein production in CD8 T cells with Cmax, AUC0-28 and AUC0-84, respectively. % Protein production is calculated by % cells with any protein production (anti-ID stimulation)−% cells with any protein production (control).

[0063] FIG. 7 depicts the correlation of the percent of CD8+ cells simultaneously producing two proteins with in vivo CART cell expansion. FIG. 7 shows that the percent of CD8+ T cells simultaneously producing two proteins negatively correlates with in vivo CART cell expansion. The data presented in FIG. 7 is based on Pearson correlative studies using Cmax data from 20 patients, AUC0-28 and AUC0-84 data from 18 patients, with significant negative correlations observed between % 2 Protein production in CD8 T cells with Cmax, AUC0-28 and AUC0-84, respectively. % 2 Protein production is calculated by % cells producing two proteins (anti-ID stimulation)−% cells producing two proteins (control).

[0064] FIG. 8 depicts an exemplary block diagram of a computer system on which various aspects and embodiments may be practiced.

### DEFINITIONS

[0065] Unless defined otherwise, all technical and scientific terms used herein have the same meaning as commonly understood by one of ordinary skill in the art to which the invention pertains.

[0066] The term “a” and “an” refers to one or to more than one (i.e., to at least one) of the grammatical object of the article. By way of example, “an element” means one element or more than one element.

[0067] The term “about” when referring to a measurable value such as an amount, a temporal duration, and the like, is meant to encompass variations of ±20% or in some instances ±10%, or in some instances ±5%, or in some instances ±1%, or in some instances ±0.1% from the specified value, as such variations are appropriate to perform the disclosed methods.

[0068] “Acquire” or “acquiring” as the terms are used herein, refer to obtaining possession of a physical entity (e.g., a sample, a polypeptide, a nucleic acid, or a sequence), or a value, e.g., a numerical value, by “directly acquiring” or “indirectly acquiring” the physical entity or value. “Directly acquiring” means performing a process (e.g., performing a synthetic or analytical method) to obtain the physical entity or value. “Indirectly acquiring” refers to receiving the physical entity or value from another party or source (e.g., a third party laboratory that directly acquired the physical entity or value). Directly acquiring a physical entity includes performing a process that includes a physical change in a physical substance, e.g., a starting material. Exemplary changes include making a physical entity from two or more starting materials, shearing or fragmenting a substance, separating or purifying a substance, combining two or more separate entities into a mixture, performing a chemical reaction that includes breaking or forming a covalent or non-covalent bond. Directly acquiring a value includes performing a process that includes a physical change in a sample or another substance, e.g., performing an analytical process which includes a physical change in a substance, e.g., a sample, analyte, or reagent (sometimes referred to herein as “physical analysis”), performing an analytical method, e.g., a method which includes one or more of the following: separating or purifying a substance, e.g., an analyte, or a fragment or other derivative thereof, from another substance; combining an analyte, or fragment or other derivative thereof, with another substance, e.g., a buffer, solvent, or reactant; or changing the structure of an analyte, or a fragment or other derivative thereof, e.g., by breaking or forming a covalent or non-covalent bond, between a first and a second atom of the analyte; or by changing the structure of a reagent, or a fragment or other derivative thereof, e.g., by breaking or forming a covalent or non-covalent bond, between a first and a second atom of the reagent.

[0069] The term “antibody,” as used herein, refers to a protein, or polypeptide sequence derived from an immunoglobulin molecule which specifically binds with an antigen. Antibodies can be polyclonal or monoclonal, multiple or single chain, or intact immunoglobulins, and may be derived from natural sources or from recombinant sources. Antibodies can be tetramers of immunoglobulin molecules.

[0070] The term “antibody fragment” refers to at least one portion of an antibody, that retains the ability to specifically interact with (e.g., by binding, steric hindrance, stabilizing/destabilizing, spatial distribution) an epitope of an antigen. Examples of antibody fragments include, but are not limited to, Fab, Fab′, F(ab′)₂, Fv fragments, scFv antibody fragments, disulfide-linked Fvs (sdFv), a Fd fragment consisting of the VH and CH1 domains, linear antibodies, single domain antibodies such as sdAb (either VL or VH), camelid VHH domains, multi-specific antibodies formed from antibody fragments such as a bivalent fragment comprising two Fab fragments linked by a disulfide bridge at the hinge region, and an isolated CDR or other epitope binding fragments of an antibody. An antigen binding fragment can also be incorporated into single domain antibodies, maxibodies, minibodies, nanobodies, intrabodies, diabodies, triabodies, tetrabodies, v-NAR and bis-scFv (see, e.g., Hollinger and Hudson, Nature Biotechnology 23:1126-1136, 2005). Antigen binding fragments can also be grafted into scaffolds based on polypeptides such as a fibronectin type III (Fn3)(see U.S. Pat. No. 6,703,199, which describes fibronectin polypeptide minibodies). The term “scFv” refers to a fusion protein comprising at least one antibody fragment comprising a variable region of a light chain and at least one antibody fragment comprising a variable region of a heavy chain, wherein the light and heavy chain variable regions are contiguously linked via a short flexible polypeptide linker, and capable of being expressed as a single chain polypeptide, and wherein the scFv retains the specificity of the intact antibody from which it is derived. Unless specified, as used herein an scFv may have the VL and VH variable regions in either order, e.g., with respect to the N-terminal and C-terminal ends of the polypeptide, the scFv may comprise VL-linker-VH or may comprise VH-linker-VL.

[0071] The term “antibody heavy chain,” refers to the larger of the two types of polypeptide chains present in antibody molecules in their naturally occurring conformations, and which normally determines the class to which the antibody belongs.

[0072] The term “antibody light chain,” refers to the smaller of the two types of polypeptide chains present in antibody molecules in their naturally occurring conformations. Kappa (κ) and lambda (λ) light chains refer to the two major antibody light chain isotypes.

[0073] The term “complementarity determining region” or “CDR,” as used herein, refers to the sequences of amino acids within antibody variable regions which confer antigen specificity and binding affinity. For example, in general, there are three CDRs in each heavy chain variable region (e.g., HCDR1, HCDR2, and HCDR3) and three CDRs in each light chain variable region (LCDR1, LCDR2, and LCDR3). The precise amino acid sequence boundaries of a given CDR can be determined using any of a number of well-known schemes, including those described by Kabat et al. (1991), “Sequences of Proteins of Immunological Interest,” 5th Ed. Public Health Service, National Institutes of Health, Bethesda, Md. (“Kabat” numbering scheme), Al-Lazikani et al., (1997) JMB 273,927-948 (“Chothia” numbering scheme), or a combination thereof. Under the Kabat numbering scheme, in some embodiments, the CDR amino acid residues in the heavy chain variable domain (VH) are numbered 31-35 (HCDR1), 50-65 (HCDR2), and 95-102 (HCDR3); and the CDR amino acid residues in the light chain variable domain (VL) are numbered 24-34 (LCDR1), 50-56 (LCDR2), and 89-97 (LCDR3). Under the Chothia numbering scheme, in some embodiments, the CDR amino acids in the VH are numbered 26-32 (HCDR1), 52-56 (HCDR2), and 95-102 (HCDR3); and the CDR amino acid residues in the VL are numbered 26-32 (LCDR1), 50-52 (LCDR2), and 91-96 (LCDR3). In a combined Kabat and Chothia numbering scheme, in some embodiments, the CDRs correspond to the amino acid residues that are part of a Kabat CDR, a Chothia CDR, or both. For instance, in some embodiments, the CDRs correspond to amino acid residues 26-35 (HCDR1), 50-65 (HCDR2), and 95-102 (HCDR3) in a VH, e.g., a mammalian VH, e.g., a human VH; and amino acid residues 24-34 (LCDR1), 50-56 (LCDR2), and 89-97 (LCDR3) in a VL, e.g., a mammalian VL, e.g., a human VL.

[0074] The term “anti-cancer effect” refers to a biological effect which can be manifested by various means, including but not limited to, e.g., a decrease in tumor volume, a decrease in the number of cancer cells, a decrease in the number of metastases, an increase in life expectancy, decrease in cancer cell proliferation, decrease in cancer cell survival, or amelioration of various physiological symptoms associated with the cancerous condition. An “anti-cancer effect” can also be manifested by the ability of the peptides, polynucleotides, cells and antibodies in prevention of the occurrence of cancer in the first place. The term “anti-tumor effect” refers to a biological effect which can be manifested by various means, including but not limited to, e.g., a decrease in tumor volume, a decrease in the number of tumor cells, a decrease in tumor cell proliferation, or a decrease in tumor cell survival.

[0075] The term “allogeneic” refers to any material derived from a different animal of the same species as the individual to whom the material is introduced. Two or more individuals are said to be allogeneic to one another when the genes at one or more loci are not identical. In some aspects, allogeneic material from individuals of the same species may be sufficiently unlike genetically to interact antigenically.

[0076] The term “apheresis” as used herein refers to an extracorporeal process by which the blood of a donor or patient is removed from the donor or patient and passed through an apparatus that separates out selected particular constituent(s) and returns the remainder to the circulation of the donor or patient, e.g., by retransfusion. Thus, in the context of “an apheresis sample” refers to a sample obtained using apheresis.

[0077] The term “autologous” refers to any material derived from the same individual to whom it is later to be re-introduced into the individual.

[0078] The term “cancer” refers to a disease characterized by the uncontrolled growth of aberrant cells. Cancer cells can spread locally or through the bloodstream and lymphatic system to other parts of the body. Examples of various cancers are described herein and include but are not limited to, breast cancer, prostate cancer, ovarian cancer, cervical cancer, skin cancer, pancreatic cancer, colorectal cancer, renal cancer, liver cancer, brain cancer, lymphoma, leukemia, lung cancer and the like. Cancers include, but are not limited to, B-cell acute lymphocytic leukemia (B-ALL), T-cell acute lymphocytic leukemia (T-ALL), acute lymphocytic leukemia (ALL), chronic myelogenous leukemia (CML), chronic lymphocytic leukemia (CLL), B cell promyelocytic leukemia, blastic plasmacytoid dendritic cell neoplasm, Burkitt's lymphoma, diffuse large B cell lymphoma, follicular lymphoma, hairy cell leukemia, small cell- or a large cell-follicular lymphoma, malignant lymphoproliferative conditions, MALT lymphoma, mantle cell lymphoma (MCL), marginal zone lymphoma, multiple myeloma, myelodysplasia and myelodysplastic syndrome, non-Hodgkin lymphoma, Hodgkin lymphoma, plasmablastic lymphoma, plasmacytoid dendritic cell neoplasm, and Waldenstrom macroglobulinemia. In an embodiment, the cancer is associated with CD19 expression. The terms “tumor” and “cancer” are used interchangeably herein, e.g., both terms encompass solid and liquid tumors. As used herein, the term “cancer” or “tumor” includes premalignant, as well as malignant cancers and tumors.

[0079] The terms “cancer associated antigen” or “tumor antigen” interchangeably refers to a molecule (typically protein, carbohydrate or lipid) that is preferentially expressed on the surface of a cancer cell, either entirely or as a fragment (e.g., MHC/peptide), in comparison to a normal cell, and which is useful for the preferential targeting of a pharmacological agent to the cancer cell. In some embodiments, a tumor antigen is a marker expressed by both normal cells and cancer cells, e.g., a lineage marker, e.g., CD19 on B cells. In some embodiments, a cancer-associated antigen is a cell surface molecule that is overexpressed in a cancer cell in comparison to a normal cell, for instance, 1-fold over expression, 2-fold overexpression, 3-fold overexpression or more in comparison to a normal cell. In some embodiments, a cancer-associated antigen is a cell surface molecule that is inappropriately synthesized in the cancer cell, for instance, a molecule that contains deletions, additions or mutations in comparison to the molecule expressed on a normal cell. In some embodiments, a tumor antigen will be expressed exclusively on the cell surface of a cancer cell, entirely or as a fragment (e.g., MHC/peptide), and not synthesized or expressed on the surface of a normal cell. In some embodiments, the CARs of the present invention includes CARs comprising an antigen binding domain (e.g., antibody or antibody fragment) that binds to a MHC presented peptide. Normally, peptides derived from endogenous proteins fill the pockets of Major histocompatibility complex (MHC) class I molecules, and are recognized by T cell receptors (TCRs) on CD8+T lymphocytes. The MHC class I complexes are constitutively expressed by all nucleated cells. In cancer, virus-specific and/or tumor-specific peptide/MHC complexes represent a unique class of cell surface targets for immunotherapy. TCR-like antibodies targeting peptides derived from viral or tumor antigens in the context of human leukocyte antigen (HLA)-A1 or HLA-A2 have been described (see, e.g., Sastry et al., J Virol. 2011 85(5):1935-1942; Sergeeva et al., Blood, 2011 117(16):4262-4272; Verma et al., J Immunol 2010 184(4):2156-2165; Willemsen et al., Gene Ther 2001 8(21):1601-1608; Dao et al., Sci Transl Med 2013 5(176):176ra33; Tassev et al., Cancer Gene Ther 2012 19(2):84-100). For example, TCR-like antibody can be identified from screening a library, such as a human scFv phage displayed library.

[0080] As used herein, the term “CD19” refers to the Cluster of Differentiation 19 protein, which is an antigenic determinant detectable on leukemia precursor cells. The human and murine amino acid and nucleic acid sequences can be found in a public database, such as GenBank, UniProt and Swiss-Prot. For example, the amino acid sequence of human CD19 can be found as UniProt/Swiss-Prot Accession No. P15391 and the nucleotide sequence encoding of the human CD19 can be found at Accession No. NM_001178098. As used herein, “CD19” includes proteins comprising mutations, e.g., point mutations, fragments, insertions, deletions and splice variants of full length wild-type CD19. CD19 is expressed on most B lineage cancers, including, e.g., acute lymphoblastic leukemia, chronic lymphocyte leukemia and non-Hodgkin lymphoma. Other cells which express CD19 are provided below in the definition of “disease associated with expression of CD19.” It is also an early marker of B cell progenitors. See, e.g., Nicholson et al., MOL. IMMUN. 34 (16-17): 1157-1165 (1997). In one aspect the antigen-binding portion of the CAR-expressing cell (e.g., T cell, NK cell) recognizes and binds an antigen within the extracellular domain of the CD19 protein. In one aspect, the CD19 protein is expressed on a cancer cell. In one embodiment, the CD19 has a wild-type sequence, e.g., a wild-type human sequence. In another embodiment, the CD19 has a mutant sequence, e.g., a mutant human sequence.

[0081] The term “Chimeric Antigen Receptor” or alternatively a “CAR” refers to a set of polypeptides, typically two in the simplest embodiments, which when in an immune effector cell, provides the cell with specificity for a target cell, typically a cancer cell, and with intracellular signal generation. In some embodiments, a CAR comprises at least an extracellular antigen binding domain, a transmembrane domain and a cytoplasmic signaling domain (also referred to herein as “an intracellular signaling domain”) comprising a functional signaling domain derived from a stimulatory molecule and/or costimulatory molecule as defined below. In some embodiments, the set of polypeptides are in the same polypeptide chain (e.g., comprise a chimeric fusion protein). In some embodiments, the set of polypeptides are not contiguous with each other, e.g., are in different polypeptide chains. In some aspects, the set of polypeptides include a dimerization switch that, upon the presence of a dimerization molecule, can couple the polypeptides to one another, e.g., can couple an antigen binding domain to an intracellular signaling domain. In one aspect, the stimulatory molecule of the CAR is the zeta chain associated with the T cell receptor complex. In one aspect, the cytoplasmic signaling domain comprises a primary signaling domain (e.g., a primary signaling domain of CD3-zeta). In one aspect, the cytoplasmic signaling domain further comprises one or more functional signaling domains derived from at least one costimulatory molecule as defined below. In one aspect, the costimulatory molecule is chosen from 4-1BB (i.e., CD137), CD27, ICOS, and/or CD28. In one aspect, the CAR comprises a chimeric fusion protein comprising an extracellular antigen recognition domain, a transmembrane domain and an intracellular signaling domain comprising a functional signaling domain derived from a stimulatory molecule. In one aspect, the CAR comprises a chimeric fusion protein comprising an extracellular antigen recognition domain, a transmembrane domain and an intracellular signaling domain comprising a functional signaling domain derived from a co-stimulatory molecule and a functional signaling domain derived from a stimulatory molecule. In one aspect, the CAR comprises a chimeric fusion protein comprising an extracellular antigen recognition domain, a transmembrane domain and an intracellular signaling domain comprising two functional signaling domains derived from one or more co-stimulatory molecule(s) and a functional signaling domain derived from a stimulatory molecule. In one aspect, the CAR comprises a chimeric fusion protein comprising an extracellular antigen recognition domain, a transmembrane domain and an intracellular signaling domain comprising at least two functional signaling domains derived from one or more co-stimulatory molecule(s) and a functional signaling domain derived from a stimulatory molecule. In one aspect the CAR comprises an optional leader sequence at the amino-terminus (N-ter) of the CAR fusion protein. In one aspect, the CAR further comprises a leader sequence at the N-terminus of the extracellular antigen recognition domain, wherein the leader sequence is optionally cleaved from the antigen recognition domain (e.g., a scFv) during cellular processing and localization of the CAR to the cellular membrane. In an embodiment, the CAR is CTL019.

[0082] The portion of the CAR composition comprising an antibody or antibody fragment thereof may exist in a variety of forms where the antigen binding domain is expressed as part of a contiguous polypeptide chain including, for example, a single domain antibody fragment (sdAb), a single chain antibody (scFv) and a humanized antibody (Harlow et al., 1999, In: USING ANTIBODIES: A LABORATORY MANUAL, COLD SPRING HARBOR LABORATORY PRESS, NY; Harlow et al., 1989, In: ANTIBODIES: A LABORATORY MANUAL, Cold Spring Harbor, New York; Houston et al., 1988, PROC. NATL. ACAD. SCI. USA 85:5879-5883; Bird et al., 1988, Science 242:423-426). In one aspect, the antigen binding domain of a CAR composition of the invention comprises an antibody fragment. In a further aspect, the CAR comprises an antibody fragment that comprises a scFv.

[0083] As used herein, the term “binding domain” or “antibody molecule” refers to a protein, e.g., an immunoglobulin chain or fragment thereof, comprising at least one immunoglobulin variable domain sequence. The term “binding domain” or “antibody molecule” encompasses antibodies and antibody fragments. In an embodiment, an antibody molecule is a multispecific antibody molecule, e.g., it comprises a plurality of immunoglobulin variable domain sequences, wherein a first immunoglobulin variable domain sequence of the plurality has binding specificity for a first epitope and a second immunoglobulin variable domain sequence of the plurality has binding specificity for a second epitope. In an embodiment, a multispecific antibody molecule is a bispecific antibody molecule. A bispecific antibody has specificity for no more than two antigens. A bispecific antibody molecule is characterized by a first immunoglobulin variable domain sequence which has binding specificity for a first epitope and a second immunoglobulin variable domain sequence that has binding specificity for a second epitope.

[0084] The portion of the CAR of the invention comprising an antibody or antibody fragment thereof may exist in a variety of forms where the antigen binding domain is expressed as part of a contiguous polypeptide chain including, for example, a single domain antibody fragment (sdAb), a single chain antibody (scFv), a humanized antibody, or bispecific antibody (Harlow et al., 1999, In: Using Antibodies: A Laboratory Manual, Cold Spring Harbor Laboratory Press, NY; Harlow et al., 1989, In: Antibodies: A Laboratory Manual, Cold Spring Harbor, N.Y.; Houston et al., 1988, Proc. Natl. Acad. Sci. USA 85:5879-5883; Bird et al., 1988, Science 242:423-426). In one aspect, the antigen binding domain of a CAR composition of the invention comprises an antibody fragment. In a further aspect, the CAR comprises an antibody fragment that comprises a scFv.

[0085] The phrase “disease associated with expression of CD19” includes, but is not limited to, a disease associated with expression of CD19 (e.g., wild type or mutant CD19) or condition associated with cells which express, or at any time expressed, CD19 including, e.g., proliferative diseases such as a cancer or malignancy or a precancerous condition such as a myelodysplasia, a myelodysplastic syndrome or a preleukemia; or a noncancer related indication associated with cells which express CD19. For the avoidance of doubt, a disease associated with expression of CD19 may include a condition associated with cells which do not presently express CD19, e.g., because CD19 expression has been downregulated, e.g., due to treatment with a molecule targeting CD19, e.g., a CD19 CAR, but which at one time expressed CD19. In one aspect, a cancer associated with expression of CD19 is a hematological cancer. In one aspect, the hematological cancer is a leukemia or a lymphoma. In one aspect, a cancer associated with expression of CD19 includes cancers and malignancies including, but not limited to, e.g., one or more acute leukemias including but not limited to, e.g., acute myeloid leukemia (AML), B-cell acute lymphocytic leukemia (“B-ALL”), T-cell acute lymphocytic leukemia (“T-ALL”), acute lymphocytic leukemia (ALL); one or more chronic leukemias including but not limited to, e.g., chronic myelogenous leukemia (CML), chronic lymphocytic leukemia (CLL). Additional cancers or hematologic conditions associated with expression of CD19 comprise, but are not limited to, e.g., B cell promyelocytic leukemia, blastic plasmacytoid dendritic cell neoplasm, Burkitt's lymphoma, diffuse large B cell lymphoma, follicular lymphoma, hairy cell leukemia, small cell- or a large cell-follicular lymphoma, malignant lymphoproliferative conditions, MALT lymphoma, mantle cell lymphoma (MCL), marginal zone lymphoma, multiple myeloma, myelodysplasia and myelodysplastic syndrome, non-Hodgkin lymphoma, Hodgkin lymphoma, plasmablastic lymphoma, plasmacytoid dendritic cell neoplasm, Waldenstrom macroglobulinemia, myeloproliferative neoplasm; a histiocytic disorder (e.g., a mast cell disorder or a blastic plasmacytoid dendritic cell neoplasm); a mast cell disorder, e.g., systemic mastocytosis or mast cell leukemia; B-cell prolymphocytic leukemia, plasma cell myeloma, and “preleukemia” which are a diverse collection of hematological conditions united by ineffective production (or dysplasia) of myeloid blood cells, and the like. Further diseases associated with expression of CD19 expression include, but not limited to, e.g., atypical and/or non-classical cancers, malignancies, precancerous conditions or proliferative diseases associated with expression of CD19. Non-cancer related indications associated with expression of CD19 include, but are not limited to, e.g., autoimmune disease, (e.g., lupus), inflammatory disorders (allergy and asthma) and transplantation. In some embodiments, the tumor antigen-expressing cells express, or at any time expressed, mRNA encoding the tumor antigen. In an embodiment, the tumor antigen-expressing cells produce the tumor antigen protein (e.g., wild-type or mutant), and the tumor antigen protein may be present at normal levels or reduced levels. In an embodiment, the tumor antigen -expressing cells produced detectable levels of a tumor antigen protein at one point, and subsequently produced substantially no detectable tumor antigen protein. In other embodiments, the disease is a CD19-negative cancer, e.g., a CD19-negative relapsed cancer. In some embodiments, the tumor antigen (e.g., CD19)-expressing cell expresses, or at any time expressed, mRNA encoding the tumor antigen. In an embodiment, the tumor antigen (e.g., CD19)-expressing cell produces the tumor antigen protein (e.g., wild-type or mutant), and the tumor antigen protein may be present at normal levels or reduced levels. In an embodiment, the tumor antigen (e.g., CD19)-expressing cell produced detectable levels of a tumor antigen protein at one point, and subsequently produced substantially no detectable tumor antigen protein.

[0086] The term “costimulatory molecule” refers to the cognate binding partner on a T cell that specifically binds with a costimulatory ligand, thereby mediating a costimulatory response by the T cell, such as, but not limited to, proliferation. Costimulatory molecules are cell surface molecules other than antigen receptors or their ligands that are required for an efficient immune response. Costimulatory molecules include, but are not limited to MHC class I molecule, TNF receptor proteins, Immunoglobulin-like proteins, cytokine receptors, integrins, signalling lymphocytic activation molecules (SLAM proteins), activating NK cell receptors, BTLA, a Toll ligand receptor, OX40, CD2, CD7, CD27, CD28, CD30, CD40, CDS, ICAM-1, LFA-1 (CD11a/CD18), 4-1BB (CD137), B7-H3, CDS, ICAM-1, ICOS (CD278), GITR, BAFFR, LIGHT, HVEM (LIGHTR), KIRDS2, SLAMF7, NKp80 (KLRF1), NKp44, NKp30, NKp46, CD19, CD4, CD8alpha, CD8beta, IL2R beta, IL2R gamma, IL7R alpha, ITGA4, VLA1, CD49a, ITGA4, IA4, CD49D, ITGA6, VLA-6, CD49f, ITGAD, CD11d, ITGAE, CD103, ITGAL, CD11a, LFA-1, ITGAM, CD11b, ITGAX, CD11c, ITGB1, CD29, ITGB2, CD18, LFA-1, ITGB7, NKG2D, NKG2C, TNFR2, TRANCE/RANKL, DNAM1 (CD226), SLAMF4 (CD244, 2B4), CD84, CD96 (Tactile), CEACAM1, CRTAM, Ly9 (CD229), CD160 (BY55), PSGL1, CD100 (SEMA4D), CD69, SLAMF6 (NTB-A, Ly108), SLAM (SLAMF1, CD150, IPO-3), BLAME (SLAMF8), SELPLG (CD162), LTBR, LAT, GADS, SLP-76, PAG/Cbp, CD19a, and a ligand that specifically binds with CD83.

[0087] A costimulatory intracellular signaling domain refers to an intracellular portion of a costimulatory molecule. The intracellular signaling domain can comprise the entire intracellular portion, or the entire native intracellular signaling domain, of the molecule from which it is derived, or a functional fragment thereof.

[0088] In some embodiments, a therapy that includes a CD19 inhibitor, e.g., a CD19 CAR therapy, may relapse or be refractory to treatment. The relapse or resistance can be caused by CD19 loss (e.g., an antigen loss mutation) or other CD19 alteration that reduces the level of CD19 (e.g., caused by clonal selection of CD19-negative clones). A cancer that harbors such CD19 loss or alteration is referred to herein as a “CD19-negative cancer” or a “CD19-negative relapsed cancer”). It shall be understood that a CD19-negative cancer need not have 100% loss of CD19, but a sufficient reduction to reduce the effectiveness of a CD19 therapy such that the cancer relapses or becomes refractory. In some embodiments, a CD19-negative cancer results from a CD19 CAR therapy. In some embodiments, a CD19-negative multiple myeloma can be treated with a CD19 CAR-expressing therapy, e.g., as described in PCT/US2015/024671, filed Apr. 7, 2015 (e.g., paragraphs 9 and 90, and Example 6 therein), which is incorporated by reference in its entirety. In some embodiments, a CD19-negative cancer can be treated with a CAR-expressing therapy, e.g., a CD123 CAR-expressing therapy, e.g., as described in PCT/US2015/045898 filed Aug. 19, 2015 (e.g., p. 26, p. 30, and Example 7 therein) which is incorporated by reference in its entirety.

[0089] The term “endogenous” refers to any material from or produced inside an organism, cell, tissue or system.

[0090] The term “effective amount” or “therapeutically effective amount” are used interchangeably herein, and refer to an amount of a compound, formulation, material, or composition, as described herein effective to achieve a particular biological result.

[0091] The term “exogenous” refers to any material introduced from or produced outside an organism, cell, tissue or system.

[0092] The term “expression” or “expresses” refers to the transcription and/or translation of a particular nucleotide sequence driven by a promoter.

[0093] The term “flexible polypeptide linker” or “linker” as used in the context of a scFv refers to a peptide linker that consists of amino acids such as glycine and/or serine residues used alone or in combination, to link variable heavy and variable light chain regions together. In one embodiment, the flexible polypeptide linker is a Gly/Ser linker and comprises the amino acid sequence (Gly-Gly-Gly-Ser)ₙ, where n is a positive integer equal to or greater than 1. For example, n=1, n=2, n=3, n=4, n=5, n=6, n=7, n=8, n=9 and n=10 (SEQ ID NO:387). In one embodiment, the flexible polypeptide linkers include, but are not limited to, (Gly₄Ser)₄ (SEQ ID NO:384) or (Gly₄ Ser)₃ (SEQ ID NO:385). In another embodiment, the linkers include multiple repeats of (Gly₂Ser), (GlySer) or (Gly₃Ser) (SEQ ID NO:386). Also included within the scope of the invention are linkers described in WO2012/138475, incorporated herein by reference.

[0094] The terms “homology” or “identity,” as used interchangeably herein, refer to sequence similarity between two polynucleotide sequences or between two polypeptide sequences, with identity being a more strict comparison. The phrases “percent identity or homology” and “% identity or homology” refer to the percentage of sequence similarity found in a comparison of two or more polynucleotide sequences or two or more polypeptide sequences. “Sequence similarity” refers to the percent similarity in base pair sequence (as determined by any suitable method) between two or more polynucleotide sequences. Two or more sequences can be anywhere from 0-100% similar, or any integer value there between. Identity or similarity can be determined by comparing a position in each sequence that can be aligned for purposes of comparison. When a position in the compared sequence is occupied by the same nucleotide base or amino acid, then the molecules are identical at that position. A degree of similarity or identity between polynucleotide sequences is a function of the number of identical or matching nucleotides at positions shared by the polynucleotide sequences. A degree of identity of polypeptide sequences is a function of the number of identical amino acids at positions shared by the polypeptide sequences. A degree of homology or similarity of polypeptide sequences is a function of the number of amino acids at positions shared by the polypeptide sequences. The term “substantial homology,” as used herein, refers to homology of at least 50%, at least 60%, at least 65%, at least 70%, at least 75%, at least 80%, at least 85%, at least 90%, at least 95% or more.

[0095] “Humanized” forms of non-human (e.g., murine) antibodies are chimeric immunoglobulins, immunoglobulin chains or fragments thereof (such as Fv, Fab, Fab′, F(ab′)2 or other antigen-binding subsequences of antibodies) which contain minimal sequence derived from non-human immunoglobulin. For the most part, humanized antibodies and antibody fragments thereof are human immunoglobulins (recipient antibody or antibody fragment) in which residues from a complementary-determining region (CDR) of the recipient are replaced by residues from a CDR of a non-human species (donor antibody) such as mouse, rat or rabbit having the desired specificity, affinity, and capacity. In some instances, Fv framework region (FR) residues of the human immunoglobulin are replaced by corresponding non-human residues. Furthermore, a humanized antibody/antibody fragment can comprise residues which are found neither in the recipient antibody nor in the imported CDR or framework sequences. These modifications can further refine and optimize antibody or antibody fragment performance. In general, the humanized antibody or antibody fragment thereof will comprise substantially all of at least one, and typically two, variable domains, in which all or substantially all of the CDR regions correspond to those of a non-human immunoglobulin and all or a significant portion of the FR regions are those of a human immunoglobulin sequence. The humanized antibody or antibody fragment can also comprise at least a portion of an immunoglobulin constant region (Fc), typically that of a human immunoglobulin. For further details, see Jones et al., NATURE, 321: 522-525, 1986; Reichmann et al., NATURE, 332: 323-329, 1988; Presta, CURR. OP. STRUCT. BIOL., 2: 593-596, 1992.

[0096] “Immune effector cell,” as that term is used herein, refers to a cell that is involved in an immune response, e.g., in the promotion of an immune effector response. Examples of immune effector cells include T cells, e.g., alpha/beta T cells and gamma/delta T cells, B cells, natural killer (NK) cells, natural killer T (NK-T) cells, mast cells, and myeloid-derived phagocytes.

[0097] “Immune effector function or immune effector response,” as that term is used herein, refers to function or response, e.g., of an immune effector cell, that enhances or promotes an immune attack of a target cell. E.g., an immune effector function or response refers a property of a T or NK cell that promotes killing or the inhibition of growth or proliferation, of a target cell. In the case of a T cell, primary stimulation and co-stimulation are examples of immune effector function or response.

[0098] The term “effector function” refers to a specialized function of a cell. Effector function of a T cell, for example, may be cytolytic activity or helper activity including the secretion of cytokines.

[0099] The term “4-1BB” refers to a member of the TNFR superfamily with an amino acid sequence provided as GenBank Acc. No. AAA62478.2, or the equivalent residues from a non-human species, e.g., mouse, rodent, monkey, ape and the like; and a “4-1BB costimulatory domain” is defined as amino acid residues 214-255 of GenBank Acc No. AAA62478.2, or the equivalent residues from a non-human species, e.g., mouse, rodent, monkey, ape and the like. In one aspect, the “4-1BB costimulatory domain” is the sequence provided as SEQ ID NO:14 or the equivalent residues from a non-human species, e.g., mouse, rodent, monkey, ape and the like.

[0100] An “intracellular signaling domain,” as the term is used herein, refers to an intracellular portion of a molecule. The intracellular signaling domain can generate a signal that promotes an immune effector function of the CAR containing cell, e.g., a CAR-expressing cell, e.g., a T cell or an NK cell. Examples of immune effector function, e.g., in a CAR-expressing cell include, cytolytic activity and helper activity, including the secretion of cytokines. In embodiments, the intracellular signal domain transduces the effector function signal and directs the cell to perform a specialized function. While the entire intracellular signaling domain can be employed, in many cases it is not necessary to use the entire chain. To the extent that a truncated portion of the intracellular signaling domain is used, such truncated portion may be used in place of the intact chain as long as it transduces the effector function signal. The term intracellular signaling domain is thus meant to include any truncated portion of the intracellular signaling domain sufficient to transduce the effector function signal.

[0101] In an embodiment, the intracellular signaling domain can comprise a primary intracellular signaling domain. Exemplary primary intracellular signaling domains include those derived from the molecules responsible for primary stimulation, or antigen dependent simulation. In an embodiment, the intracellular signaling domain can comprise a costimulatory intracellular domain. Exemplary costimulatory intracellular signaling domains include those derived from molecules responsible for costimulatory signals, or antigen independent stimulation. For example, in the case of a CAR-expressing cell (e.g., a T cell, an NK cell), a primary intracellular signaling domain can comprise a cytoplasmic sequence of a T cell receptor, and a costimulatory intracellular signaling domain can comprise cytoplasmic sequence from co-receptor or costimulatory molecule.

[0102] A primary intracellular signaling domain can comprise a signaling motif which is known as an immunoreceptor tyrosine-based activation motif or ITAM. Examples of ITAM containing primary cytoplasmic signaling sequences include, but are not limited to, those derived from CD3 zeta, FcR gamma, FcR beta, CD3 gamma, CD3 delta, CD3 epsilon, CD5, CD22, CD79a, CD79b, CD278 (“ICOS”), FcεRI, CD66d, CD32, DAP10, and DAP12.

[0103] As used herein, “in vitro transcribed RNA” refers to RNA, preferably mRNA, that has been synthesized in vitro. Generally, the in vitro transcribed RNA is generated from an in vitro transcription vector. The in vitro transcription vector comprises a template that is used to generate the in vitro transcribed RNA.

[0104] The term “isolated” means altered or removed from the natural state. For example, a nucleic acid or a peptide naturally present in a living animal is not “isolated,” but the same nucleic acid or peptide partially or completely separated from the coexisting materials of its natural state is “isolated.” An isolated nucleic acid or protein can exist in substantially purified form, or can exist in a non-native environment such as, for example, a host cell.

[0105] The term “lentivirus” refers to a genus of the Retroviridae family. Lentiviruses are unique among the retroviruses in being able to infect non-dividing cells; they can deliver a significant amount of genetic information into the DNA of the host cell, so they are one of the most efficient methods of a gene delivery vector. HIV, SIV, and FIV are all examples of lentiviruses.

[0106] The term “lentiviral vector” refers to a vector derived from at least a portion of a lentivirus genome, including especially a self-inactivating lentiviral vector as provided in Milone et al., MOL. THER. 17(8): 1453-1464 (2009). Other examples of lentivirus vectors that may be used in the clinic, include but are not limited to, e.g., the LENTIVECTOR® gene delivery technology from Oxford BioMedica, the LENTIMAX™ vector system from Lentigen and the like. Nonclinical types of lentiviral vectors are also available and would be known to one skilled in the art.

[0107] The term ‘low, immune enhancing, dose” when used in conjunction with an mTOR inhibitor, e.g., an allosteric mTOR inhibitor, e.g., RAD001 or rapamycin, or a catalytic mTOR inhibitor, refers to a dose of mTOR inhibitor that partially, but not fully, inhibits mTOR activity, e.g., as measured by the inhibition of P70 S6 kinase activity. Methods for evaluating mTOR activity, e.g., by inhibition of P70 S6 kinase, are discussed herein. The dose is insufficient to result in complete immune suppression but is sufficient to enhance the immune response. In an embodiment, the low, immune enhancing, dose of mTOR inhibitor results in a decrease in the number of PD-1 positive immune effector cells, e.g., T cells or NK cells and/or an increase in the number of PD-1 negative immune effector cells, e.g., T cells or NK cells, or an increase in the ratio of PD-1 negative immune effector cells, e.g., T cells or NK cells/PD-1 positive immune effector cells, e.g., T cells or NK cells.

[0108] In general, the term “naïve T cell” refers to immune cells that comprise antigen-inexperienced cells, e.g., immune cells that are precursors of memory cells. In some embodiments, naïve T cells may be differentiated, but have not yet encountered their cognate antigen, and therefore are activated T cells or memory T cells. In some embodiments, naïve T cells may be characterized by expression of CD62L, CD27, CCR7, CD45RA, CD28, and CD127, and the absence of CD95, or CD45RO isoform. In certain embodiments, a naïve T cells is a type of younger T cell as described herein.

[0109] The term “less exhausted” or “less exhausted phenotype” refers to immune effector cells that have reduced (e.g., lack) expression of immune cell exhaustion markers, e.g. PD1, TIM3, and LAG3. In some embodiments, a less exhausted cell may be a younger T cell as described herein.

[0110] The term “nucleic acid” or “polynucleotide” refers to deoxyribonucleic acid (DNA) or ribonucleic acid (RNA), or a combination of a DNA or RNA thereof, and polymers thereof in either single- or double-stranded form. The term “nucleic acid” includes a gene, cDNA or an mRNA. In one embodiment, the nucleic acid molecule is synthetic (e.g., chemically synthesized) or recombinant. Unless specifically limited, the term encompasses nucleic acids containing analogues or derivatives of natural nucleotides that have similar binding properties as the reference nucleic acid and are metabolized in a manner similar to naturally occurring nucleotides. Unless otherwise indicated, a particular nucleic acid sequence also implicitly encompasses conservatively modified variants thereof (e.g., degenerate codon substitutions), alleles, orthologs, SNPs, and complementary sequences as well as the sequence explicitly indicated. Specifically, degenerate codon substitutions may be achieved by generating sequences in which the third position of one or more selected (or all) codons is substituted with mixed-base and/or deoxyinosine residues (Batzer et al., NUCLEIC ACID RES. 19:5081 (1991); Ohtsuka et al., J. BIOL. CHEM. 260:2605-2608 (1985); and Rossolini et al., MOL. CELL. Probes 8:91-98 (1994)). In the context of the present invention, the following abbreviations for the commonly occurring nucleic acid bases are used. “A” refers to adenosine, “C” refers to cytosine, “G” refers to guanosine, “T” refers to thymidine, and “U” refers to uridine.

[0111] The terms “peptide,” “polypeptide,” and “protein” are used interchangeably, and refer to a compound comprised of amino acid residues covalently linked by peptide bonds. A protein or peptide must contain at least two amino acids, and no limitation is placed on the maximum number of amino acids that can comprise a protein's or peptide's sequence. Polypeptides include any peptide or protein comprising two or more amino acids joined to each other by peptide bonds. As used herein, the term refers to both short chains, which also commonly are referred to in the art as peptides, oligopeptides and oligomers, for example, and to longer chains, which generally are referred to in the art as proteins, of which there are many types. “Polypeptides” include, for example, biologically active fragments, substantially homologous polypeptides, oligopeptides, homodimers, heterodimers, variants of polypeptides, modified polypeptides, derivatives, analogs, fusion proteins, among others. A polypeptide includes a natural peptide, a recombinant peptide, or a combination thereof.

[0112] As used herein, a “poly(A)” is a series of adenosines attached by polyadenylation to the mRNA. In some embodiments of a construct for transient expression, the polyA is between 50 and 5000 (SEQ ID NO: 388) (e.g., 2000; SEQ ID NO: 389), e.g., 64 (SEQ ID NO: 390), e.g., greater than 100 (e.g., 150, SEQ ID NO: 391), e.g., greater than 400 (SEQ ID NO: 392). poly(A) sequences can be modified chemically or enzymatically to modulate mRNA functionality such as localization, stability or efficiency of translation.

[0113] The term “probe” refers to any molecule which is capable of selectively binding to a specifically intended target molecule, for example a marker of the invention. Probes can be either synthesized by one skilled in the art, or derived from appropriate biological preparations. For purposes of detection of the target molecule, probes can be specifically designed to be labeled, as described herein. Examples of molecules that can be utilized as probes include, but are not limited to, RNA, DNA, proteins, antibodies, and organic monomers.

[0114] The term “promoter” refers to a DNA sequence recognized by the synthetic machinery of the cell, or introduced synthetic machinery, required to initiate the specific transcription of a polynucleotide sequence.

[0115] The term “promoter/regulatory sequence” refers to a nucleic acid sequence which is required for expression of a gene product operably linked to the promoter/regulatory sequence. In some instances, this sequence may be the core promoter sequence and in other instances, this sequence may also include an enhancer sequence and other regulatory elements which are required for expression of the gene product. The promoter/regulatory sequence may, for example, be one which expresses the gene product in a tissue specific manner.

[0116] The term “prophylaxis” as used herein means the prevention of or protective treatment for a disease or disease state.

[0117] Ranges: throughout this disclosure, various aspects of the invention can be presented in a range format. It should be understood that the description in range format is merely for convenience and brevity and should not be construed as an inflexible limitation on the scope of the invention. Accordingly, the description of a range should be considered to have specifically disclosed all the possible subranges as well as individual numerical values within that range. For example, description of a range such as from 1 to 6 should be considered to have specifically disclosed subranges such as from 1 to 3, from 1 to 4, from 1 to 5, from 2 to 4, from 2 to 6, from 3 to 6 etc., as well as individual numbers within that range, for example, 1, 2, 2.7, 3, 4, 5, 5.3, and 6. As another example, a range such as 95-99% identity, includes something with 95%, 96%, 97%, 98% or 99% identity, and includes subranges such as 96-99%, 96-98%, 96-97%, 97-99%, 97-98% and 98-99% identity. This applies regardless of the breadth of the range.

[0118] The term “recombinant antibody” refers to an antibody which is generated using recombinant DNA technology, such as, for example, an antibody expressed by a bacteriophage or yeast expression system. The term should also be construed to mean an antibody which has been generated by the synthesis of a DNA molecule encoding the antibody and which DNA molecule expresses an antibody protein, or an amino acid sequence specifying the antibody, wherein the DNA or amino acid sequence has been obtained using recombinant DNA or amino acid sequence technology which is available and well known in the art.

[0119] “Refractory” as used herein refers to a disease, e.g., cancer, that does not respond to a treatment. In embodiments, a refractory cancer can be resistant to a treatment before or at the beginning of the treatment. In other embodiments, the refractory cancer can become resistant during a treatment. A refractory cancer is also called a resistant cancer.

[0120] In embodiments, a reference or control level or activity is the level and/or activity in a subject, e.g., a sample obtained from one or more of: a baseline or prior value for the subject (e.g., prior to treatment with a CAR-expressing cell); the subject at a different time interval; an average or median value for a cancer patient population; a healthy control; or a healthy subject population (e.g., a control).

[0121] “Sample,” “tissue sample,” “patient sample,” “patient cell or tissue sample” or “specimen” each refers to a biological sample obtained from a tissue or bodily fluid of a subject or patient. The source of the tissue sample can be solid tissue as from a fresh, frozen and/or preserved organ, tissue sample, biopsy, or aspirate; blood or any blood constituents (e.g., serum, plasma); bodily fluids such as urine, cerebral spinal fluid, whole blood, plasma and serum. The sample can include a non-cellular fraction (e.g., urine, plasma, serum, or other non-cellular body fluid). In one embodiment, the sample is a urine sample. In other embodiments, the body fluid from which the sample is obtained from an individual comprises blood (e.g., whole blood). In an embodiment, the sample is a whole blood sample obtained from the subject. In certain embodiments, the blood can be further processed to obtain plasma or serum. In an embodiment, the sample is an apheresis sample obtained from the blood of the subject. In an embodiment, the sample is a manufactured product sample, e.g., genetically engineered T cells obtained from the blood of the subject, e.g., a manufactured CAR-expressing cell (e.g., T cell, NK cell) product, e.g., a manufactured CD19 CAR-expressing cell product. In another embodiment, the sample contains a tissue, cells (e.g., peripheral blood mononuclear cells (PBMC)). For example, the sample can be a fine needle biopsy sample, an archival sample (e.g., an archived sample with a known diagnosis and/or treatment history), a histological section (e.g., a frozen or formalin-fixed section, e.g., after long term storage), among others. The term sample includes any material obtained and/or derived from a biological sample, including a polypeptide, and nucleic acid (e.g., genomic DNA, cDNA, RNA) purified or processed from the sample. Purification and/or processing of the sample can involve one or more of extraction, concentration, antibody isolation, sorting, concentration, fixation, addition of reagents and the like. The sample can contain compounds that are not naturally intermixed with the tissue in nature such as preservatives, anticoagulants, buffers, fixatives, nutrients, antibiotics or the like.

[0122] The term “product” or “manufactured product” as used herein, refers to a manufactured composition comprising a genetically engineered cell (e.g., an immune effector cell), e.g., a population of cells in which a plurality of cells are engineered to express a CAR, e.g., a CAR described herein. A manufactured product can be any genetically engineered immune effector cell (e.g., T cell, NK cell), e.g., genetically engineered immune effector cells obtained from the blood of the subject, e.g., a manufactured CAR-expressing cell product, e.g., a manufactured CD19 CAR-expressing cell product. In an embodiment, a cell (e.g., an immune effector cell) engineered to express a CAR may be obtained from an activated cryopreserved expanded cell population (e.g., an expanded immune effector cell population).

[0123] The term “signaling domain” refers to the functional portion of a protein which acts by transmitting information within the cell to regulate cellular activity via defined signaling pathways by generating second messengers or functioning as effectors by responding to such messengers.

[0124] The term “specifically binds,” refers to an antibody, or a ligand, which recognizes and binds with a cognate binding partner protein present in a sample, but which antibody or ligand does not substantially recognize or bind other molecules in the sample.

[0125] The term “stimulation,” refers to a primary response induced by binding of a stimulatory molecule (e.g., a TCR/CD3 complex) with its cognate ligand thereby mediating a signal transduction event, such as, but not limited to, signal transduction via the TCR/CD3 complex. Stimulation can mediate altered expression of certain molecules, such as down regulation of TGF-β, and/or reorganization of cytoskeletal structures, and the like.

[0126] The term “stimulatory molecule,” refers to a molecule expressed by a T cell that provides the primary cytoplasmic signaling sequence(s) that regulate primary activation of the TCR complex in a stimulatory way for at least some aspect of the T cell signaling pathway. In one aspect, the primary signal is initiated by, for instance, binding of a TCR/CD3 complex with an MHC molecule loaded with peptide, and which leads to mediation of a T cell response, including, but not limited to, proliferation, activation, differentiation, and the like. A primary cytoplasmic signaling sequence (also referred to as a “primary signaling domain”) that acts in a stimulatory manner may contain a signaling motif which is known as immunoreceptor tyrosine-based activation motif or ITAM. Examples of an ITAM containing cytoplasmic signaling sequence that is of particular use in the invention includes, but is not limited to, those derived from CD3 zeta, common FcR gamma (FCER1G), Fc gamma RIIa, FcR beta (Fc Epsilon R1b), CD3 gamma, CD3 delta, CD3 epsilon, CD79a, CD79b, DAP10, and DAP12. In a specific CAR of the invention, the intracellular signaling domain in any one or more CARS of the invention comprises an intracellular signaling sequence, e.g., a primary signaling sequence of CD3-zeta. In a specific CAR of the invention, the primary signaling sequence of CD3-zeta is the sequence provided as SEQ ID NO:18 (mutant CD3 zeta), or the equivalent residues from a non-human species, e.g., mouse, rodent, monkey, ape and the like. In a specific CAR of the invention, the primary signaling sequence of CD3-zeta is the sequence as provided in SEQ ID NO:20 (wild-type human CD3 zeta), or the equivalent residues from a non-human species, e.g., mouse, rodent, monkey, ape and the like.

[0127] The term “subject” is intended to include living organisms in which an immune response can be elicited (e.g., mammals, human). In an embodiment, a subject is a mammal. In an embodiment, a subject is a human. In an embodiment, a subject is a patient.

[0128] The term “therapeutic” as used herein means a treatment. A therapeutic effect is obtained by reduction, suppression, remission, or eradication of a disease state.

[0129] The term “transfected” or “transformed” or “transduced” refers to a process by which exogenous nucleic acid is transferred or introduced into the host cell. A “transfected” or “transformed” or “transduced” cell is one which has been transfected, transformed or transduced with exogenous nucleic acid. The cell includes the primary subject cell and its progeny.

[0130] As used herein, “transient” refers to expression of a non-integrated transgene for a period of hours, days or weeks, wherein the period of time of expression is less than the period of time for expression of the gene if integrated into the genome or contained within a stable plasmid replicon in the host cell.

[0131] The term “transmembrane domain,” refers to a polypeptide that spans the plasma membrane. In an embodiment, it links an extracellular sequence, e.g., a switch domain, an extracellular recognition element, e.g., an antigen binding domain, an inhibitory counter ligand binding domain, or costimulatory ECD domain, to an intracellular sequence, e.g., to a switch domain or an intracellular signaling domain. A transmembrane domain can include one or more additional amino acids adjacent to the transmembrane region, e.g., one or more amino acid associated with the extracellular region of the protein from which the transmembrane was derived (e.g., 1, 2, 3, 4, 5, 6, 7, 8, 9, 10 up to 15 amino acids of the extracellular region) and/or one or more additional amino acids associated with the intracellular region of the protein from which the transmembrane protein is derived (e.g., 1, 2, 3, 4, 5, 6, 7, 8, 9, 10 up to 15 amino acids of the intracellular region). Examples of transmembrane domains are disclosed herein.

[0132] The terms “treat”, “treatment” and “treating” refer to the reduction or amelioration of the progression, severity and/or duration of a proliferative disorder, or the amelioration of one or more symptoms (e.g., one or more discernible symptoms) of a proliferative disorder resulting from the administration of one or more therapies (e.g., one or more therapeutic agents such as a CAR of the invention). In specific embodiments, the terms “treat”, “treatment” and “treating” refer to the amelioration of at least one measurable physical parameter of a proliferative disorder, such as growth of a tumor, not necessarily discernible by the patient. In other embodiments the terms “treat”, “treatment” and “treating” -refer to the inhibition of the progression of a proliferative disorder, either physically by, e.g., stabilization of a discernible symptom, physiologically by, e.g., stabilization of a physical parameter, or both. In other embodiments the terms “treat”, “treatment” and “treating” refer to the reduction or stabilization of tumor size or cancerous cell count.

[0133] The term “xenogeneic” refers to a graft derived from an animal of a different species.

[0134] The term “zeta” or alternatively “zeta chain”, “CD3-zeta” or “TCR-zeta” is defined as the protein provided as GenBank Acc. No. BAG36664.1, or the equivalent residues from a non-human species, e.g., mouse, rodent, monkey, ape and the like, and a “zeta stimulatory domain” or alternatively a “CD3-zeta stimulatory domain” or a “TCR-zeta stimulatory domain” is defined as the amino acid residues from the cytoplasmic domain of the zeta chain that are sufficient to functionally transmit an initial signal necessary for T cell activation. In one aspect the cytoplasmic domain of zeta comprises residues 52 through 164 of GenBank Acc. No. BAG36664.1 or the equivalent residues from a non-human species, e.g., mouse, rodent, monkey, ape and the like, that are functional orthologs thereof. Various aspects of the invention are described in further detail below. Additional definitions are set out throughout the specification.

### DETAILED DESCRIPTION OF CERTAIN EMBODIMENTS

[0135] The present disclosure provides, inter alia, in vitro CART cell characterization assays, such as potency assays, that correlate with clinical efficacy and safety parameters of CART cell therapy. Also provided herein are in vitro CART cell characterization assays which provide a single cell signature (e.g., the number, frequency, or percentage of polyfunctional cells (e.g., cells expressing 2, 3, 4, 5, 6, or more proteins, e.g., cytokines)) of CART cells in a sample.

### Assessment of Signature

### Analysis of Intracellular Proteins

[0136] Analysis of levels of expression and/or activity of gene products correlated with the pharmacokinetics of a manufactured CAR-expressing cell composition (e.g., a CAR-expressing cell product) (e.g., a CD19 CAR-expressing cell therapy described herein such as, e.g., CTL019) and cancer disease progression (e.g., a hematological cancer such as CLL and ALL) has led to the identification of novel CART cell signatures. For example, the present invention provides methods for the number, frequency, and/or percentage of one of polyfunctional CART cells, e.g., the following cell populations in a sample of CART cell population (e.g., a manufactured CART cell population, e.g., a manufactured CD19 CART cell population), wherein each cell of the cell population expresses: IL2; IFNγ; IL17A; TNF; IL8; CD107a; IL2 and IFNγ; IL2 and IL17A; IL2 and TNF; IL2 and IL8; IL2 and CD107a; IFNγ and IL17A; IFNγ and TNF; IFN and IL8; IFNγ and CD107a; IL17A and TNF; IL17A and IL8; IL17A and CD107a; TNF and IL8; TNF and CD107a; IL8 and CD107a; IL2, IFNγ, and IL17A; IL2, IFNγ, and TNF; IL2, IFNγ, and IL8; IL2, IFNγ, and CD107a; IL2, IL17A, and TNF; IL2, IL17A, and IL8; IL2, IL17A, and CD107a; IL2, TNF, and IL8; IL2, TNF, and CD107a; IL2, IL8, and CD107a; IFNγ, IL17A, and TNF; IFNγ, IL17A, and IL8; IFNγ, IL17A, and CD107a; IFNγ, TNF, and IL8; IFNγ, TNF, and CD107a; IFNγ, IL8, and CD107a; IL17A, TNF, and IL8; IL17A, TNF, and CD107a; IL17A, IL8, and CD107a; TNF, IL8, and CD107a; IL2, IFNγ, IL17A, and TNF; IL2, IFNγ, IL17A, and IL8; IL2, IFNγ, IL17A, and CD107a; IL2, IFNγ, TNF, and IL8; IL2, IFNγ, TNF, and CD107a; IL2, IFNγ, IL8, and CD107a; IL2, IL17A, TNF, and IL8; IL2, IL17A, TNF, and CD107a; IL2, IL17A, IL8, and CD107a; IL2, TNF, IL8, and CD107a; IFNγ, IL17A, TNF, and IL8; IFNγ, IL17A, TNF, and CD107a; IFNγ, IL17A, IL8, and CD107a; IFNγ, TNF, IL8, and CD107a; IL17A, TNF, IL8, and CD107a; IL2, IFNγ, IL17A, TNF, and IL8; IL2, IFNγ, IL17A, TNF, and CD107a; IL2, IFNγ, IL17A, IL8, and CD107a; IL2, IFNγ, TNF, IL8, and CD107a; IL2, IFNγ, IL17A, TNF, IL8, and CD107a; IL2, IL17A, TNF, IL8, and CD107a; or IFNγ, IL17A, TNF, IL8, or CD107a.

### Methods for Detection of Protein Expression

[0137] Protein expression level can be assayed. Expression of a protein described herein can be assessed by any of a wide variety of known methods for detecting expression of a transcribed molecule or protein. In a specific embodiment the protein expression is assayed using a method which detects the expression of the protein intracellularly, such as intracellular cytokine staining method (ISC). ISC can be performed using any commercially available assay, e.g., GolgiStop® (BD Biosiences), GolgiPlug® (BD Biosciences), or any combination thereof, or any other commercially available ICS kit. A general ISC protocol is described below.

### Intracellular Cytokine Staining

[0138] Generally, ISC is performed by treating the cells with a protein transport inhibitor, fixing and permeabilizing the cells, staining, and detecting.

[0139] Protein Transport Inhibitors

[0140] ISC is generally performed using a protein transport inhibitor (e.g., monensin, brefeldin A) in order to retain otherwise secreted proteins within the cell. Exemplary protocol see e.g., Kochenderfer J N, et al. Chemotherapy-refractory diffuse large B-cell lymphoma and indolent B-cell malignancies can be effectively treated with autologous T cells expressing an anti-CD19 chimeric antigen receptor. J Clin Oncol 33, 540-549 (2015).

### Fixing and Permeabilization

[0141] Cells are generally fixed before intracellular staining to ensure stability of soluble antigens or antigens with a short half-life. Fixing retains the target protein in the original cellular location. Detecting intracellular antigens requires cell permeabilization before staining. Antibodies are generally prepared in permeabilization buffer to ensure the cells remain permeable. When gating on cell populations, the light scatter profiles of the cells on the flow cytometer generally change considerably after permeabilization. If any proteins are to be detected on the cell surface, cell surface staining should be performed prior to fixation.

[0142] Several methods are commercially available and known in the art for cell fixation and permeabilization. For example, (a) Formaldehyde followed by detergent, wherein fixation requires in 0.01% formaldehyde for 10-15 min, and permeabilization using one of the following detergents: (1) Triton or NP-40 (0.1-1% in PBS) partially dissolve the nuclear membrane so are suitable for nuclear antigen staining. Loss of cell membrane and cytoplasm will result in decreased light scattering and reduced non-specific fluorescence. (2) Tween 20, Saponin, Digitonin and Leucoperm (0.5% v/v in PBS) enable antibodies to go through pores without dissolving plasma membrane. They are suitable for antigens in the cytoplasm or the cytoplasmic face of the plasma membrane and soluble nuclear antigens. (b) Formaldehyde (0.01%) followed by methanol. (c) Methanol followed by detergent, wherein ice cold methanol is added to each cell sample, the cells are gently mixed and incubated at −20° C. for 10 min, and the cells centrifuge and washed twice in PBS 1% BSA. (d) Acetone fixation and permeabilization, wherein ice cold acetone is added to each sample, the cells are gently mixed and incubated at −20° C. for 5-10 min, and the cells centrifuge and washed twice in PBS 1% BSA.

[0143] Intracellular Staining

[0144] The cells are generally washed in permeabilizing detergent), centrifuged, the supernatant discarded and suspended. The cells are then labeled using antibodies. Generally, the antibodies are prepared in permeabilization buffer to ensure the cells remain permeable. The antibodies are detectable antibodies (e.g., fluorescently labeled antibodies) that bind to the protein of interest (e.g., a protein described herein) according to standard methods known in the art.

[0145] Antibodies can be polyclonal or monoclonal. An intact antibody, or a fragment thereof (e.g., Fab or F(ab′)₂) can be used. The term “labeled”, with regard to the probe or antibody, is intended to encompass direct labeling of the probe or antibody by coupling (i.e., physically linking) a detectable substance to the probe or antibody, as well as indirect labeling of the probe or antibody by reactivity with another reagent that is directly labeled. Examples of indirect labeling include detection of a primary antibody using a fluorescently labeled secondary antibody and end-labeling of a DNA probe with biotin such that it can be detected with fluorescently labeled streptavidin.

[0146] In another embodiment, the antibody is labeled, e.g., a radio-labeled, chromophore-labeled, fluorophore-labeled, or enzyme-labeled antibody. In another embodiment, an antibody derivative (e.g., an antibody conjugated with a substrate or with the protein or ligand of a protein-ligand pair (e.g., biotin-streptavidin)), or an antibody fragment (e.g., a single-chain antibody, an isolated antibody hypervariable domain, etc.) which binds specifically with a protein corresponding to the marker, such as the protein encoded by the open reading frame corresponding to the marker or such a protein which has undergone all or a portion of its normal post-translational modification, is used.

[0147] The proteins of interest can then be detected using a standard detection method, e.g., FACS.

### Kits

[0148] The disclosure also encompasses kits for detecting the presence of a polypeptide or nucleic acid corresponding to a protein described herein in a biological sample, e.g., a sample containing tissue, whole blood, serum, plasma, buccal scrape, saliva, cerebrospinal fluid, urine, stool, and bone marrow. Such kits can be used to determine the dosing regimen (e.g., dose, schedule, timing) of manufactured CART product. For example, the kit can comprise a labeled compound or agent capable of detecting a polypeptide or an mRNA encoding a polypeptide corresponding to a protein described herein in a biological sample and means for determining the amount of the polypeptide or mRNA in the sample (e.g., an antibody which binds the polypeptide or an oligonucleotide probe which binds to DNA or mRNA encoding the polypeptide). Kits can also include instructions for interpreting the results obtained using the kit.

[0149] Suitable reagents for binding with a polypeptide corresponding to a protein described herein include antibodies, antibody derivatives, antibody fragments, and the like. Suitable reagents for binding with a nucleic acid (e.g., a genomic DNA, an mRNA, a spliced mRNA, a cDNA, or the like) include complementary nucleic acids. For example, the nucleic acid reagents can include oligonucleotides (labeled or non-labeled) fixed to a substrate, labeled oligonucleotides not bound with a substrate, pairs of PCR primers, molecular beacon probes, and the like.

[0150] The kit can optionally comprise additional components useful for performing the methods described herein. By way of example, the kit can comprise fluids (e.g., SSC buffer) suitable for annealing complementary nucleic acids or for binding an antibody with a protein with which it specifically binds, one or more sample compartments, an instructional material which describes performance of a method of the invention, a reference sample for comparison of expression levels of the proteins described herein, and the like.

[0151] A kit of the invention can comprise a reagent useful for determining protein level or protein activity of a protein of a signature described herein.

[0152] In some embodiments, the kit comprises:

[0153] a set of reagents that specifically detects the number, frequency, and/or percentage of one of the following cell populations in a sample, wherein each cell of the cell population expresses: IL2; IFNγ; IL17A; TNF; IL8; CD107a; IL2 and IFNγ; IL2 and IL17A; IL2 and TNF; IL2 and IL8; IL2 and CD107a; IFNγ and IL17A; IFNγ and TNF; IFN and IL8; IFNγ and CD107a; IL17A and TNF; IL17A and IL8; IL17A and CD107a; TNF and IL8; TNF and CD107a; IL8 and CD107a; IL2, IFNγ, and IL17A; IL2, IFNγ, and TNF; IL2, IFNγ, and IL8; IL2, IFNγ, and CD107a; IL2, IL17A, and TNF; IL2, IL17A, and IL8; IL2, IL17A, and CD107a; IL2, TNF, and IL8; IL2, TNF, and CD107a; IL2, IL8, and CD107a; IFNγ, IL17A, and TNF; IFNγ, IL17A, and IL8; IFNγ, IL17A, and CD107a; IFNγ, TNF, and IL8; IFNγ, TNF, and CD107a; IFNγ, IL8, and CD107a; IL17A, TNF, and IL8; IL17A, TNF, and CD107a; IL17A, IL8, and CD107a; TNF, IL8, and CD107a; IL2, IFNγ, IL17A, and TNF; IL2, IFNγ, IL17A, and IL8; IL2, IFNγ, IL17A, and CD107a; IL2, IFNγ, TNF, and IL8; IL2, IFNγ, TNF, and CD107a; IL2, IFNγ, IL8, and CD107a; IL2, IL17A, TNF, and IL8; IL2, IL17A, TNF, and CD107a; IL2, IL17A, IL8, and CD107a; IL2, TNF, IL8, and CD107a; IFNγ, IL17A, TNF, and IL8; IFNγ, IL17A, TNF, and CD107a; IFNγ, IL17A, IL8, and CD107a; IFNγ, TNF, IL8, and CD107a; IL17A, TNF, IL8, and CD107a; IL2, IFNγ, IL17A, TNF, and IL8; IL2, IFNγ, IL17A, TNF, and CD107a; IL2, IFNγ, IL17A, IL8, and CD107a; IL2, IFNγ, TNF, IL8, and CD107a; IL2, IFNγ, IL17A, TNF, IL8, and CD107a; IL2, IL17A, TNF, IL8, and CD107a; or IFNγ, IL17A, TNF, IL8, or CD107a; and instructions for using said kit.

[0154] In an embodiment, a kit is provided for assessing the potency of a manufactured CAR-expressing cell composition (e.g., a CAR-expressing cell product). In an embodiment, a kit is provided for assessing the dose regimen of a manufactured CAR-expressing cell composition (e.g., a CAR-expressing cell product).

### Therapeutic Agents, Compositions and Administration

[0155] The methods described herein can be used to evaluate the potency of a manufactured CAR-expressing cell composition (e.g., a CAR-expressing cell product). In one embodiment, the CAR-expressing cell expresses a CAR molecule comprising an antigen binding domain (e.g., an antibody or antibody fragment that specifically binds to a tumor antigen), a transmembrane domain, and an intracellular signaling domain (e.g., an intracellular signaling domain comprising a costimulatory domain and/or a primary signaling domain). In an embodiment, the antigen binding domain comprises any antibody, or a fragment thereof, e.g., an scFv, known in the art that targets or specifically binds to any of the tumor antigens described herein. For example, the tumor antigen is BCMA (also known as TNFRSF17, Tumor Necrosis Factor Receptor Superfamily, Member 17, or B Cell Maturation Antigen), CD33, CLL-1 (also known as C-type Lectin-Like domain family 1, or CLECL1) or claudin-6 (CLDN6). The antibody, or fragment thereof, can be a murine, humanized, or fully human antibody or fragment thereof, e.g., an scFv.

[0156] In one embodiment, the CAR comprises an antibody or antibody fragment which includes an anti-CD19 binding domain described herein (e.g., a murine or humanized antibody or antibody fragment that specifically binds to CD19 as described herein), a transmembrane domain described herein, and an intracellular signaling domain described herein (e.g., an intracellular signaling domain comprising a costimulatory domain and/or a primary signaling domain described herein).

### Antigen Binding Domain

[0157] In one aspect, the CAR of the invention comprises a target-specific binding element otherwise referred to as an antigen binding domain. The choice of moiety depends upon the type and number of ligands that define the surface of a target cell. For example, the antigen binding domain may be chosen to recognize a ligand that acts as a cell surface marker on target cells associated with a particular disease state. Thus, examples of cell surface markers that may act as ligands for the antigen binding domain in a CAR of the invention include those associated with viral, bacterial and parasitic infections, autoimmune disease and cancer cells.

[0158] In one aspect, the CAR-mediated T-cell response can be directed to an antigen of interest by way of engineering an antigen binding domain that specifically binds a desired antigen into the CAR.

[0159] In one aspect, the portion of the CAR comprising the antigen binding domain comprises an antigen binding domain that targets a tumor antigen, e.g., a tumor antigen described herein.

[0160] The antigen binding domain can be any domain that binds to the antigen including but not limited to a monoclonal antibody, a polyclonal antibody, a recombinant antibody, a human antibody, a humanized antibody, and a functional fragment thereof, including but not limited to a single-domain antibody such as a heavy chain variable domain (VH), a light chain variable domain (VL) and a variable domain (VHH) of camelid derived nanobody, and to an alternative scaffold known in the art to function as antigen binding domain, such as a recombinant fibronectin domain, a T cell receptor (TCR), or a fragment there of, e.g., single chain TCR, and the like. In some instances, it is beneficial for the antigen binding domain to be derived from the same species in which the CAR will ultimately be used in. For example, for use in humans, it may be beneficial for the antigen binding domain of the CAR to comprise human or humanized residues for the antigen binding domain of an antibody or antibody fragment.

[0161] Any known CD19 CAR, e.g., the CD19 antigen binding domain of any known CD19 CAR, in the art can be used in accordance with the instant invention. For example, LG-740; CD19 CAR described in the U.S. Pat. Nos. 8,399,645; 7,446,190; Xu et al., Leuk Lymphoma. 2013 54(2):255-260(2012); Cruz et al., Blood 122(17):2965-2973 (2013); Brentjens et al., Blood, 118(18):4817-4828 (2011); Kochenderfer et al., Blood 116(20):4099-102 (2010); Kochenderfer et al., Blood 122 (25):4129-39(2013); and 16th Annu Meet Am Soc Gen Cell Ther (ASGCT) (May 15-18, Salt Lake City) 2013, Abst 10.

[0162] Exemplary target antigens that can be targeted using the CAR-expressing cells, include, but are not limited to, CD19, CD123, EGFRvIII, mesothelin, among others, as described in, for example, WO 2014/130635, WO 2014/130657, and WO 2015/090230, each of which is herein incorporated by reference in its entirety.

[0163] In one embodiment, the CAR T cell that specifically binds to CD19 has the USAN designation TISAGENLECLEUCEL-T. CTL019 is made by a gene modification of T cells is mediated by stable insertion via transduction with a self-inactivating, replication deficient Lentiviral (LV) vector containing the CTL019 transgene under the control of the EF-1 alpha promoter. CTL019 can be a mixture of transgene positive and negative T cells that are delivered to the subject on the basis of percent transgene positive T cells.

[0164] In other embodiments, the CAR-expressing cells can specifically bind to human CD19, e.g., can include a CAR molecule, or an antigen binding domain (e.g., a humanized antigen binding domain) according to Table 3 of WO2014/153270, incorporated herein by reference.

[0165] In other embodiments, the CAR-expressing cells can specifically bind to CD123, e.g., can include a CAR molecule (e.g., any of the CAR1-CAR8), or an antigen binding domain according to Tables 1-2 of WO 2014/130635, incorporated herein by reference.

[0166] In other embodiments, the CAR-expressing cells can specifically bind to EGFRvIII, e.g., can include a CAR molecule, or an antigen binding domain according to Table 2 or SEQ ID NO:11 of WO 2014/130657, incorporated herein by reference.

[0167] In other embodiments, the CAR-expressing cells can specifically bind to human BCMA, e.g., can include a CAR molecule, or an antigen binding domain (e.g., a humanized antigen binding domain).

[0168] In other embodiments, the CAR-expressing cells can specifically bind to mesothelin, e.g., can include a CAR molecule, or an antigen binding domain according to Tables 2-3 of WO 2015/090230, incorporated herein by reference.

[0169] In one embodiment, the antigen binding domain comprises one, two three (e.g., all three) heavy chain CDRs, HC CDR1, HC CDR2 and HC CDR3, from an antibody listed above, and/or one, two, three (e.g., all three) light chain CDRs, LC CDR1, LC CDR2 and LC CDR3, from an antibody listed above. In one embodiment, the antigen binding domain comprises a heavy chain variable region and/or a variable light chain region of an antibody listed or described above. In some embodiments, the tumor antigen is a tumor antigen described in International Application WO2015/142675, filed Mar. 13, 2015, which is herein incorporated by reference in its entirety. In some embodiments, the tumor antigen is chosen from one or more of: CD19; CD123; CD22; CD30; CD171; CS-1 (also referred to as CD2 subset 1, CRACC, SLAMF7, CD319, and 19A24); C-type lectin-like molecule-1 (CLL-1 or CLECL1); CD33; epidermal growth factor receptor variant III (EGFRvIII); ganglioside G2 (GD2); ganglioside GD3 (aNeu5Ac(2-8)aNeu5Ac(2-3)bDGalp(1-4)bDGlcp(1-1)Cer); TNF receptor family member B cell maturation (BCMA); Tn antigen ((Tn Ag) or (GalNAcα-Ser/Thr)); prostate-specific membrane antigen (PSMA); Receptor tyrosine kinase-like orphan receptor 1 (ROR1); Fms-Like Tyrosine Kinase 3 (FLT3); Tumor-associated glycoprotein 72 (TAG72); CD38; CD44v6; Carcinoembryonic antigen (CEA); Epithelial cell adhesion molecule (EPCAM); B7H3 (CD276); KIT (CD117); Interleukin-13 receptor subunit alpha-2 (IL-13Ra2 or CD213A2); Mesothelin; Interleukin 11 receptor alpha (IL-11Ra); prostate stem cell antigen (PSCA); Protease Serine 21 (Testisin or PRSS21); vascular endothelial growth factor receptor 2 (VEGFR2); Lewis(Y) antigen; CD24; Platelet-derived growth factor receptor beta (PDGFR-beta); Stage-specific embryonic antigen-4 (SSEA-4); CD20; Folate receptor alpha; Receptor tyrosine-protein kinase ERBB2 (Her2/neu); Mucin 1, cell surface associated (MUC1); epidermal growth factor receptor (EGFR); neural cell adhesion molecule (NCAM); Prostase; prostatic acid phosphatase (PAP); elongation factor 2 mutated (ELF2M); Ephrin B2; fibroblast activation protein alpha (FAP); insulin-like growth factor 1 receptor (IGF-I receptor), carbonic anhydrase IX (CAIX); Proteasome (Prosome, Macropain) Subunit, Beta Type, 9 (LMP2); glycoprotein 100 (gp100); oncogene fusion protein consisting of breakpoint cluster region (BCR) and Abelson murine leukemia viral oncogene homolog 1 (Abl) (bcr-abl); tyrosinase; ephrin type-A receptor 2 (EphA2); Fucosyl GM1; sialyl Lewis adhesion molecule (sLe); ganglioside GM3 (aNeu5Ac(2-3)bDGalp(1-4)bDGlcp(1-1)Cer); transglutaminase 5 (TGS5); high molecular weight-melanoma-associated antigen (HMWMAA); o-acetyl-GD2 ganglioside (OAcGD2); Folate receptor beta; tumor endothelial marker 1 (TEM1/CD248); tumor endothelial marker 7-related (TEM7R); claudin 6 (CLDN6); thyroid stimulating hormone receptor (TSHR); G protein-coupled receptor class C group 5, member D (GPRCSD); chromosome X open reading frame 61 (CXORF61); CD97; CD179a; anaplastic lymphoma kinase (ALK); Polysialic acid; placenta-specific 1 (PLAC1); hexasaccharide portion of globoH glycoceramide (GloboH); mammary gland differentiation antigen (NY-BR-1); uroplakin 2 (UPK2); Hepatitis A virus cellular receptor 1 (HAVCR1); adrenoceptor beta 3 (ADRB3); pannexin 3 (PANX3); G protein-coupled receptor 20 (GPR20); lymphocyte antigen 6 complex, locus K 9 (LY6K); Olfactory receptor 51E2 (OR51E2); TCR Gamma Alternate Reading Frame Protein (TARP); Wilms tumor protein (WT1); Cancer/testis antigen 1 (NY-ESO-1); Cancer/testis antigen 2 (LAGE-1a); Melanoma-associated antigen 1 (MAGE-A1); ETS translocation-variant gene 6, located on chromosome 12p (ETV6-AML); sperm protein 17 (SPA17); X Antigen Family, Member 1A (XAGE1); angiopoietin-binding cell surface receptor 2 (Tie 2); melanoma cancer testis antigen-1 (MAD-CT-1); melanoma cancer testis antigen-2 (MAD-CT-2); Fos-related antigen 1; tumor protein p53 (p53); p53 mutant; prostein; surviving; telomerase; prostate carcinoma tumor antigen-1 (PCTA-1 or Galectin 8), melanoma antigen recognized by T cells 1 (MelanA or MART1); Rat sarcoma (Ras) mutant; human Telomerase reverse transcriptase (hTERT); sarcoma translocation breakpoints; melanoma inhibitor of apoptosis (ML-IAP); ERG (transmembrane protease, serine 2 (TMPRSS2) ETS fusion gene); N-Acetyl glucosaminyl-transferase V (NA17); paired box protein Pax-3 (PAX3); Androgen receptor; Cyclin B1; v-myc avian myelocytomatosis viral oncogene neuroblastoma derived homolog (MYCN); Ras Homolog Family Member C (RhoC); Tyrosinase-related protein 2 (TRP-2); Cytochrome P450 1B1 (CYP1B1); CCCTC-Binding Factor (Zinc Finger Protein)-Like (BORIS or Brother of the Regulator of Imprinted Sites), Squamous Cell Carcinoma Antigen Recognized By T Cells 3 (SART3); Paired box protein Pax-5 (PAX5); proacrosin binding protein sp32 (OY-TES1); lymphocyte-specific protein tyrosine kinase (LCK); A kinase anchor protein 4 (AKAP-4); synovial sarcoma, X breakpoint 2 (SSX2); Receptor for Advanced Glycation Endproducts (RAGE-1); renal ubiquitous 1 (RU1); renal ubiquitous 2 (RU2); legumain; human papilloma virus E6 (HPV E6); human papilloma virus E7 (HPV E7); intestinal carboxyl esterase; heat shock protein 70-2 mutated (mut hsp70-2); CD79a; CD79b; CD72; Leukocyte-associated immunoglobulin-like receptor 1 (LAIR1); Fc fragment of IgA receptor (FCAR or CD89); Leukocyte immunoglobulin-like receptor subfamily A member 2 (LILRA2); CD300 molecule-like family member f (CD300LF); C-type lectin domain family 12 member A (CLEC12A); bone marrow stromal cell antigen 2 (BST2); EGF-like module-containing mucin-like hormone receptor-like 2 (EMR2); lymphocyte antigen 75 (LY75); Glypican-3 (GPC3); Fc receptor-like 5 (FCRL5); and immunoglobulin lambda-like polypeptide 1 (IGLL1).

### Bispecific CARs

[0170] In an embodiment a multispecific antibody molecule is a bispecific antibody molecule. A bispecific antibody has specificity for no more than two antigens. A bispecific antibody molecule is characterized by a first immunoglobulin variable domain sequence which has binding specificity for a first epitope and a second immunoglobulin variable domain sequence that has binding specificity for a second epitope. In an embodiment the first and second epitopes are on the same antigen, e.g., the same protein (or subunit of a multimeric protein). In an embodiment the first and second epitopes overlap. In an embodiment the first and second epitopes do not overlap. In an embodiment the first and second epitopes are on different antigens, e.g., different proteins (or different subunits of a multimeric protein). In an embodiment a bispecific antibody molecule comprises a heavy chain variable domain sequence and a light chain variable domain sequence which have binding specificity for a first epitope and a heavy chain variable domain sequence and a light chain variable domain sequence which have binding specificity for a second epitope. In an embodiment a bispecific antibody molecule comprises a half antibody having binding specificity for a first epitope and a half antibody having binding specificity for a second epitope. In an embodiment a bispecific antibody molecule comprises a half antibody, or fragment thereof, having binding specificity for a first epitope and a half antibody, or fragment thereof, having binding specificity for a second epitope. In an embodiment a bispecific antibody molecule comprises a scFv, or fragment thereof, have binding specificity for a first epitope and a scFv, or fragment thereof, have binding specificity for a second epitope.

[0171] In certain embodiments, the antibody molecule is a multi-specific (e.g., a bispecific or a trispecific) antibody molecule. Protocols for generating bispecific or heterodimeric antibody molecules, and various configurations for bispecific antibody molecules, are described in, e.g., paragraphs 455-458 of WO2015/142675, filed Mar. 13,2015, which is incorporated by reference in its entirety.

[0172] In one aspect, the bispecific antibody molecule is characterized by a first immunoglobulin variable domain sequence, e.g., a scFv, which has binding specificity for CD19, e.g., comprises a scFv as described herein, or comprises the light chain CDRs and/or heavy chain CDRs from a scFv described herein, and a second immunoglobulin variable domain sequence that has binding specificity for a second epitope on a different antigen.

### Chimeric TCR

[0173] In one aspect, the antibodies and antibody fragments of the present invention (e.g., CD19 antibodies and fragments) can be grafted to one or more constant domain of a T cell receptor (“TCR”) chain, for example, a TCR alpha or TCR beta chain, to create a chimeric TCR. Without being bound by theory, it is believed that chimeric TCRs will signal through the TCR complex upon antigen binding. For example, an scFv as disclosed herein, can be grafted to the constant domain, e.g., at least a portion of the extracellular constant domain, the transmembrane domain and the cytoplasmic domain, of a TCR chain, for example, the TCR alpha chain and/or the TCR beta chain. As another example, an antibody fragment, for example a VL domain as described herein, can be grafted to the constant domain of a TCR alpha chain, and an antibody fragment, for example a VH domain as described herein, can be grafted to the constant domain of a TCR beta chain (or alternatively, a VL domain may be grafted to the constant domain of the TCR beta chain and a VH domain may be grafted to a TCR alpha chain). As another example, the CDRs of an antibody or antibody fragment may be grafted into a TCR alpha and/or beta chain to create a chimeric TCR. For example, the LCDRs disclosed herein may be grafted into the variable domain of a TCR alpha chain and the HCDRs disclosed herein may be grafted to the variable domain of a TCR beta chain, or vice versa. Such chimeric TCRs may be produced, e.g., by methods known in the art (For example, Willemsen R A et al, Gene Therapy 2000; 7: 1369-1377; Zhang T et al, Cancer Gene Ther 2004; 11: 487-496; Aggen et al, Gene Ther. 2012 April; 19(4):365-74).

### Non-Antibody Scaffolds

[0174] In embodiments, the antigen binding domain comprises a non-antibody scaffold, e.g., a fibronectin, ankyrin, domain antibody, lipocalin, small modular immuno-pharmaceutical, maxybody, Protein A, or affilin. The non-antibody scaffold has the ability to bind to target antigen on a cell. In embodiments, the antigen binding domain is a polypeptide or fragment thereof of a naturally occurring protein expressed on a cell. In some embodiments, the antigen binding domain comprises a non-antibody scaffold. A wide variety of non-antibody scaffolds can be employed so long as the resulting polypeptide includes at least one binding region which specifically binds to the target antigen on a target cell.

[0175] Non-antibody scaffolds include: fibronectin (Novartis, Mass.), ankyrin (Molecular Partners AG, Zurich, Switzerland), domain antibodies (Domantis, Ltd., Cambridge, Mass., and Ablynx nv, Zwijnaarde, Belgium), lipocalin (Pieris Proteolab AG, Freising, Germany), small modular immuno-pharmaceuticals (Trubion Pharmaceuticals Inc., Seattle, Wash.), maxybodies (Avidia, Inc., Mountain View, Calif.), Protein A (Affibody AG, Sweden), and affilin (gamma-crystallin or ubiquitin) (Scil Proteins GmbH, Halle, Germany).

[0176] In an embodiment the antigen binding domain comprises the extracellular domain, or a counter-ligand binding fragment thereof, of molecule that binds a counterligand on the surface of a target cell.

### Transmembrane Domain

[0177] In embodiments, a CAR described herein comprises a transmembrane domain that is fused to an extracellular sequence, e.g., an extracellular recognition element, which can comprise an antigen binding domain. In an embodiment, the transmembrane domain is one that naturally is associated with one of the domains in the CAR. In an embodiment, the transmembrane domain is one that is not naturally associated with one of the domains in the CAR.

[0178] A transmembrane domain can include one or more additional amino acids adjacent to the transmembrane region, e.g., one or more amino acid associated with the extracellular region of the protein from which the transmembrane was derived (e.g., 1, 2, 3, 4, 5, 6, 7, 8, 9, 10 up to 15 amino acids of the extracellular region) and/or one or more additional amino acids associated with the intracellular region of the protein from which the transmembrane protein is derived (e.g., 1, 2, 3, 4, 5, 6, 7, 8, 9, 10 up to 15 amino acids of the intracellular region).

[0179] In embodiments, the transmembrane domain is one which minimizes interactions with other elements, e.g., other transmembrane domains. In some instances, the transmembrane domain minimizes binding of such domains to the transmembrane domains of the same or different surface membrane proteins, e.g., to minimize interactions with other members of the receptor complex. Suitable examples can be derived by selection or modification of amino acid substitution of a known transmembrane domain. In an embodiment, the transmembrane domain is capable of promoting homodimerization with another CAR on the cell surface.

[0180] The transmembrane domain may comprise a naturally occurring, or a non-naturally occurring synthetic sequence. Where naturally occurring, the transmembrane domain may be derived from any membrane-bound or transmembrane protein.

[0181] Transmembrane regions suitable for use in molecules described herein may be derived from any one or more of e.g., the alpha, beta or zeta chain of the T-cell receptor, CD28, CD3 epsilon, CD45, CD4, CD5, CD8, CD9, CD16, CD22, CD33, CD37, CD64, CD80, CD86, CD134, CD137, CD154. In some embodiments, a transmembrane domain may include at least the transmembrane region(s) of, e.g., KIRDS2, OX40, CD2, CD27, LFA-1 (CD11a, CD18), ICOS (CD278), 4-1BB (CD137), GITR, CD40, BAFFR, HVEM (LIGHTR), SLAMF7, NKp80 (KLRF1), NKp44, NKp30, NKp46, CD160, CD19, IL2R beta, IL2R gamma, IL7R α, ITGA1, VLA1, CD49a, ITGA4, IA4, CD49D, ITGA6, VLA-6, CD49f, ITGAD, CD11d, ITGAE, CD103, ITGAL, CD11a, LFA-1, ITGAM, CD11b, ITGAX, CD11c, ITGB1, CD29, ITGB2, CD18, LFA-1, ITGB7, TNFR2, DNAM1 (CD226), SLAMF4 (CD244, 2B4), CD84, CD96 (Tactile), CEACAM (e.g., CEACAM-1, CEACAM-3 and/or CEACAM-5), CRTAM, Ly9 (CD229), CD160 (BY55), PSGL1, CD100 (SEMA4D), SLAMF6 (NTB-A, Ly108), SLAM (SLAMF1, CD150, IPO-3), BLAME (SLAMF8), SELPLG (CD162), LTBR, PAG/Cbp, NKG2D, NKG2C, or CD19. In an embodiment the transmembrane domain is derived from CD8. In an embodiment the transmembrane domain is derived from CD28. In an embodiment, a sequence, e.g., a hinge or spacer sequence, can be disposed between a transmembrane domain and another sequence or domain to which it is fused. In embodiments, a variety of human hinges (aka “spacers”) can be employed as well, e.g., including but not limited to the human Ig (immunoglobulin) hinge. Optionally, a short oligo- or polypeptide linker, between 2 and 10 amino acids in length may form the linkage between the transmembrane domain and another domain, e.g., an intracellular signaling domain or costimulatory domain, of a CAR. A glycine-serine doublet provides a particularly suitable linker. In an embodiment, the transmembrane domain may be a non-naturally occurring sequence, in which case can comprise predominantly hydrophobic residues such as leucine and valine. In an embodiment, a triplet of phenylalanine, tryptophan and valine will be found at each end of a transmembrane domain.

[0182] Optionally, a short oligo- or polypeptide linker, between 2 and 10 amino acids in length may form the linkage between the transmembrane domain and the cytoplasmic region of the CAR. A glycine-serine doublet provides a particularly suitable linker. For example, in one aspect, the linker comprises the amino acid sequence of GGGGSGGGGS (SEQ ID NO:393). In some embodiments, the linker is encoded by a nucleotide sequence of GGTGGCGGAGGTTCTGGAGGTGGAGGTTCC (SEQ ID NO:394).

### Cytoplasmic Domain

[0183] The cytoplasmic domain or region of the CAR includes an intracellular signaling domain. An intracellular signaling domain is generally responsible for activation of at least one of the normal effector functions of the immune cell in which the CAR has been introduced.

[0184] Examples of intracellular signaling domains for use in the CAR of the invention include the cytoplasmic sequences of the T cell receptor (TCR) and co-receptors that act in concert to initiate signal transduction following antigen receptor engagement, as well as any derivative or variant of these sequences and any recombinant sequence that has the same functional capability.

[0185] It is known that signals generated through the TCR alone are insufficient for full activation of the T cell and that a secondary and/or costimulatory signal is also required. Thus, T cell activation can be said to be mediated by two distinct classes of cytoplasmic signaling sequences: those that initiate antigen-dependent primary activation through the TCR (primary intracellular signaling domains) and those that act in an antigen-independent manner to provide a secondary or costimulatory signal (secondary cytoplasmic domain, e.g., a costimulatory domain).

### Primary Signaling Domain

[0186] A primary signaling domain regulates primary activation of the TCR complex either in a stimulatory way, or in an inhibitory way. Primary intracellular signaling domains that act in a stimulatory manner may contain signaling motifs which are known as immunoreceptor tyrosine-based activation motifs or ITAMs.

[0187] Examples of ITAM containing primary intracellular signaling domains that are of particular use in the invention include those of TCR zeta, FcR gamma, FcR beta, CD3 gamma, CD3 delta, CD3 epsilon, CD5, CD22, CD79a, CD79b, CD278 (also known as “ICOS”), FcεRI, DAP10, DAP12, and CD66d. In one embodiment, a CAR of the invention comprises an intracellular signaling domain, e.g., a primary signaling domain of CD3-zeta, e.g., a CD3-zeta sequence described herein.

[0188] In one embodiment, a primary signaling domain comprises a modified ITAM domain, e.g., a mutated ITAM domain which has altered (e.g., increased or decreased) activity as compared to the native ITAM domain. In one embodiment, a primary signaling domain comprises a modified ITAM-containing primary intracellular signaling domain, e.g., an optimized and/or truncated ITAM-containing primary intracellular signaling domain. In an embodiment, a primary signaling domain comprises one, two, three, four or more ITAM motifs. Further examples of molecules containing a primary intracellular signaling domain that are of particular use in the invention include those of DAP10, DAP12, and CD32.

[0189] A primary intracellular signaling domain comprises a functional fragment, or analog, of a primary stimulatory molecule (e.g., CD3 zeta—GenBank Acc. No. BAG36664.1). The primary intracellular signaling domain can comprise the entire intracellular region or a fragment of the intracellular region which is sufficient for generation of an intracellular signal when an antigen binding domain to which it is fused binds cognate antigen. In embodiments the primary intracellular signaling domain has at least 70, 75, 80, 85, 90, 95, 98, or 99% sequence identity with the entire intracellular region, or a fragment of the intracellular region which is sufficient for generation of an intracellular signal, of a naturally occurring primary stimulatory molecule, e.g., a human (GenBank Acc No. BAG36664.1), or other mammalian, e.g., a nonhuman species, e.g., rodent, monkey, ape or murine intracellular primary stimulatory molecule.

[0190] In embodiments, the primary intracellular signaling domain, has at least 70, 75, 80, 85, 90, 95, 96, 97, 98, or 99% identity with, or differs by no more than 30, 25, 20, 15, 10, 5, 4, 3, 2, or 1 amino acid residues from the corresponding residues of the entire intracellular region, or a fragment of the intracellular region which is sufficient for generation of an intracellular signal, of a naturally occurring human primary stimulatory molecule, e.g., a naturally occurring human primary stimulatory molecule disclosed herein.

### Costimulatory Signaling Domain

[0191] The intracellular signalling domain of the CAR can comprise the CD3-zeta signalling domain by itself or it can be combined with any other desired intracellular signalling domain(s) useful in the context of a CAR of the invention. For example, the intracellular signalling domain of the CAR can comprise a CD3 zeta chain portion and a costimulatory signaling domain. The costimulatory signaling domain refers to a portion of the CAR comprising the intracellular domain of a costimulatory molecule. In one embodiment, the intracellular domain is designed to comprise the signaling domain of CD3-zeta and the signaling domain of CD28. In one aspect, the intracellular domain is designed to comprise the signaling domain of CD3-zeta and the signaling domain of ICOS.

[0192] A costimulatory molecule is a cell surface molecule other than an antigen receptor or its ligands that is required for an efficient response of lymphocytes to an antigen. Examples of such molecules include MHC class I molecule, TNF receptor proteins, Immunoglobulin-like proteins, cytokine receptors, integrins, signaling lymphocytic activation molecules (SLAM proteins), activating NK cell receptors, BTLA, a Toll ligand receptor, OX40, CD2, CD7, CD27, CD28, CD30, CD40, CDS, ICAM-1, LFA-1 (CD11a/CD18), 4-1BB (CD137), B7-H3, CDS, ICAM-1, ICOS (CD278), GITR, BAFFR, LIGHT, HVEM (LIGHTR), KIRDS2, SLAMF7, NKp80 (KLRF1), NKp44, NKp30, NKp46, CD19, CD4, CD8alpha, CD8beta, IL2R beta, IL2R gamma, IL7R alpha, ITGA4, VLA1, CD49a, ITGA4, IA4, CD49D, ITGA6, VLA-6, CD49f, ITGAD, CD11d, ITGAE, CD103, ITGAL, CD11a, LFA-1, ITGAM, CD11b, ITGAX, CD11c, ITGB1, CD29, ITGB2, CD18, LFA-1, ITGB7, NKG2D, NKG2C, TNFR2, TRANCE/RANKL, DNAM1 (CD226), SLAMF4 (CD244, 2B4), CD84, CD96 (Tactile), CEACAM1, CRTAM, Ly9 (CD229), CD160 (BY55), PSGL1, CD100 (SEMA4D), CD69, SLAMF6 (NTB-A, Ly108), SLAM (SLAMF1, CD150, IPO-3), BLAME (SLAMF8), SELPLG (CD162), LTBR, LAT, GADS, SLP-76, PAG/Cbp, CD19a, and a ligand that specifically binds with CD83, and the like. For example, CD27 costimulation has been demonstrated to enhance expansion, effector function, and survival of human CAR-expressing cell (e.g., T cell, NK cell) cells in vitro and augments human T cell persistence and antitumor activity in vivo (Song et al. BLOOD. 2012; 119(3):696-706). Further examples of such costimulatory molecules include CDS, ICAM-1, GITR, BAFFR, HVEM (LIGHTR), SLAMF7, NKp80 (KLRF1), NKp44, NKp30, NKp46, CD160, CD19, CD4, CD8alpha, CD8beta, IL2R beta, IL2R gamma, IL7R alpha, ITGA4, VLA1, CD49a, ITGA4, IA4, CD49D, ITGA6, VLA-6, CD49f, ITGAD, CD11d, ITGAE, CD103, ITGAL, CD11a, LFA-1, ITGAM, CD11b, ITGAX, CD11c, ITGB1, CD29, ITGB2, CD18, LFA-1, ITGB7, TNFR2, TRANCE/RANKL, DNAM1 (CD226), SLAMF4 (CD244, 2B4), CD84, CD96 (Tactile), CEACAM1, CRTAM, Ly9 (CD229), CD160 (BY55), PSGL1, CD100 (SEMA4D), CD69, SLAMF6 (NTB-A, Ly108), SLAM (SLAMF1, CD150, IPO-3), BLAME (SLAMF8), SELPLG (CD162), LTBR, LAT, GADS, SLP-76, PAG/Cbp, NKG2D and NKG2C.

[0193] The intracellular signaling sequences within the cytoplasmic portion of the CAR of the invention may be linked to each other in a random or specified order. Optionally, a short oligo- or polypeptide linker, for example, between 2 and 10 amino acids (e.g., 2, 3, 4, 5, 6, 7, 8, 9, or 10 amino acids) in length may form the linkage between intracellular signaling sequence. In one embodiment, a glycine-serine doublet can be used as a suitable linker. In one embodiment, a single amino acid, e.g., an alanine, a glycine, can be used as a suitable linker.

[0194] In one aspect, the intracellular signaling domain is designed to comprise two or more, e.g., 2, 3, 4, 5, or more, costimulatory signaling domains. In an embodiment, the two or more, e.g., 2, 3, 4, 5, or more, costimulatory signaling domains, are separated by a linker molecule, e.g., a linker molecule described herein. In one embodiment, the intracellular signaling domain comprises two costimulatory signaling domains. In some embodiments, the linker molecule is a glycine residue. In some embodiments, the linker is an alanine residue.

[0195] A costimulatory domain comprises a functional fragment, or analog, of a costimulatory molecule (e.g., ICOS, CD28, or 4-1BB). It can comprise the entire intracellular region or a fragment of the intracellular region which is sufficient for generation of an intracellular signal, e.g., when an antigen binding domain to which it is fused binds cognate antigen. In embodiments the costimulatory domain has at least 70%, 75%, 80%, 85%, 90%, 95%, 98%, or 99% sequence identity with the entire intracellular region, or a fragment of the intracellular region which is sufficient for generation of an intracellular signal, of a naturally occurring costimulatory molecule as described herein, e.g., a human, or other mammalian, e.g., a nonhuman species, e.g., rodent, monkey, ape or murine intracellular costimulatory molecule. In embodiments the costimulatory signaling domain, has at least 70, 75, 80, 85, 90, 95, 96, 97, 98, or 99% identity with, or differs by no more than 30, 25, 20, 15, 10, 5, 4, 3, 2, or 1 amino acid residues from the corresponding residues of the entire intracellular region, or a fragment of the intracellular region which is sufficient for generation of an intracellular signal, of, a naturally occurring human costimulatory molecule, e.g., a naturally occurring human costimulatory molecule disclosed herein.

[0196] Any of the CARs described herein can include one or more of the components listed in Table 1.

TABLE 1
Sequences of various components of CAR (aa—amino acids,
na—nucleic acids that encodes the corresponding protein)

| SEQ | | |
|---|---|---|
| ID | | |
| NO | description | Sequence |
| 1 | EF-1 | CGTGAGGCTCCGGTGCCCGTCAGTGGGCAGAGCGCACATCGCCCACAGTCC |
| | promoter | CCGAGAAGTTGGGGGGAGGGGTCGGCAATTGAACCGGTGCCTAGAGAAGG |
| | | TGGCGCGGGGTAAACTGGGAAAGTGATGTCGTGTACTGGCTCCGCCTTTTTC |
| | | CCGAGGGTGGGGGAGAACCGTATATAAGTGCAGTAGTCGCCGTGAACGTTC |
| | | TTTTTCGCAACGGGTTTGCCGCCAGAACACAGGTAAGTGCCGTGTGTGGTTC |
| | | CCGCGGGCCTGGCCTCTTTACGGGTTATGGCCCTTGCGTGCCTTGAATTACTT |
| | | CCACCTGGCTGCAGTACGTGATTCTTGATCCCGAGCTTCGGGTTGGAAGTGG |
| | | GTGGGAGAGTTCGAGGCCTTGCGCTTAAGGAGCCCCTTCGCCTCGTGCTTGA |
| | | GTTGAGGCCTGGCCTGGGCGCTGGGGCCGCCGCGTGCGAATCTGGTGGCAC |
| | | CTTCGCGCCTGTCTCGCTGCTTTCGATAAGTCTCTAGCCATTTAAAATTTTTGA |
| | | TGACCTGCTGCGACGCTTTTTTTCTGGCAAGATAGTCTTGTAAATGCGGGCC |
| | | AAGATCTGCACACTGGTATTTCGGTTTTTGGGGCCGCGGGCGGCGACGGGG |
| | | CCCGTGCGTCCCAGCGCACATGTTCGGCGAGGCGGGGCCTGCGAGCGCGGC |
| | | CACCGAGAATCGGACGGGGGTAGTCTCAAGCTGGCCGGCCTGCTCTGGTGC |
| | | CTGGCCTCGCGCCGCCGTGTATCGCCCCGCCCTGGGCGGCAAGGCTGGCCC |
| | | GGTCGGCACCAGTTGCGTGAGCGGAAAGATGGCCGCTTCCCGGCCCTGCTG |
| | | CAGGGAGCTCAAAATGGAGGACGCGGCGCTCGGGAGAGCGGGCGGGTGA |
| | | GTCACCCACACAAAGGAAAAGGGCCTTTCCGTCCTCAGCCGTCGCTTCATGT |
| | | GACTCCACGGAGTACCGGGCGCCGTCCAGGCACCTCGATTAGTTCTCGAGCT |
| | | TTTGGAGTACGTCGTCTTTAGGTTGGGGGGAGGGGTTTTATGCGATGGAGT |
| | | TTCCCCACACTGAGTGGGTGGAGACTGAAGTTAGGCCAGCTTGGCACTTGAT |
| | | GTAATTCTCCTTGGAATTTGCCCTTTTTGAGTTTGGATCTTGGTTCATTCTCAA |
| | | GCCTCAGACAGTGGTTCAAAGTTTTTTTCTTCCATTTCAGGTGTCGTGA |
| 2 | Leader (aa) | MALPVTALLLPLALLLHAARP |
| 3 | Leader (na) | ATGGCCCTGCCTGTGACAGCCCTGCTGCTGCCTCTGGCTCTGCTGCTGCATGC |
| | | CGCTAGACCC |
| 4 | CD8 hinge | TTTPAPRPPTPAPTIASQPLSLRPEACRPAAGGAVHTRGLDFACD |
| | (aa) | |
| 5 | CD8 hinge | ACCACGACGCCAGCGCCGCGACCACCAACACCGGCGCCCACCATCGCGTCG |
| | (na) | CAGCCCCTGTCCCTGCGCCCAGAGGCGTGCCGGCCAGCGGCGGGGGGCGCA |
| | | GTGCACACGAGGGGGCTGGACTTCGCCTGTGAT |
| 6 | Ig4 hinge | ESKYGPPCPPCPAPEFLGGPSVFLFPPKPKDTLMISRTPEVTCVVVDVSQEDPEV |
| | (aa) | QFNWYVDGVEVHNAKTKPREEQFNSTYRVVSVLTVLHQDWLNGKEYKCKVSN |
| | | KGLPSSIEKTISKAKGQPREPQVYTLPPSQEEMTKNQVSLTCLVKGFYPSDIAVE |
| | | WESNGQPENNYKTTPPVLDSDGSFFLYSRLTVDKSRWQEGNVFSCSVMHEALH |
| | | NHYTQKSLSLSLGKM |
| 7 | Ig4 hinge | GAGAGCAAGTACGGCCCTCCCTGCCCCCCTTGCCCTGCCCCCGAGTTCCTGG |
| | (na) | GCGGACCCAGCGTGTTCCTGTTCCCCCCCAAGCCCAAGGACACCCTGATGAT |
| | | CAGCCGGACCCCCGAGGTGACCTGTGTGGTGGTGGACGTGTCCCAGGAGGA |
| | | CCCCGAGGTCCAGTTCAACTGGTACGTGGACGGCGTGGAGGTGCACAACGC |
| | | CAAGACCAAGCCCCGGGAGGAGCAGTTCAATAGCACCTACCGGGTGGTGTC |
| | | CGTGCTGACCGTGCTGCACCAGGACTGGCTGAACGGCAAGGAATACAAGTG |
| | | TAAGGTGTCCAACAAGGGCCTGCCCAGCAGCATCGAGAAAACCATCAGCAA |
| | | GGCCAAGGGCCAGCCTCGGGAGCCCCAGGTGTACACCCTGCCCCCTAGCCA |
| | | AGAGGAGATGACCAAGAACCAGGTGTCCCTGACCTGCCTGGTGAAGGGCTT |
| | | CTACCCCAGCGACATCGCCGTGGAGTGGGAGAGCAACGGCCAGCCCGAGAA |
| | | CAACTACAAGACCACCCCCCCTGTGCTGGACAGCGACGGCAGCTTCTTCCTG |
| | | TACAGCCGGCTGACCGTGGACAAGAGCCGGTGGCAGGAGGGCAACGTCTTT |
| | | AGCTGCTCCGTGATGCACGAGGCCCTGCACAACCACTACACCCAGAAGAGCC |
| | | TGAGCCTGTCCCTGGGCAAGATG |
| 8 | IgD hinge | RWPESPKAQASSVPTAQPQAEGSLAKATTAPATTRNTGRGGEEKKKEKEKEEQ |
| | (aa) | EERETKTPECPSHTQPLGVYLLTPAVQDLWLRDKATFTCFVVGSDLKDAHLTWE |
| | | VAGKVPTGGVEEGLLERHSNGSQSQHSRLTLPRSLWNAGTSVTCTLNHPSLPPQ |
| | | RLMALREPAAQAPVKLSLNLLASSDPPEAASWLLCEVSGFSPPNILLMWLEDQR |
| | | EVNTSGFAPARPPPQPGSTTFWAWSVLRVPAPPSPQPATYTCVVSHEDSRTLL |
| | | NASRSLEVSYVTDH |
| 9 | IgD hinge | AGGTGGCCCGAAAGTCCCAAGGCCCAGGCATCTAGTGTTCCTACTGCACAGC |
| | (na) | CCCAGGCAGAAGGCAGCCTAGCCAAAGCTACTACTGCACCTGCCACTACGCG |
| | | CAATACTGGCCGTGGCGGGGAGGAGAAGAAAAAGGAGAAAGAGAAAGAA |
| | | GAACAGGAAGAGAGGGAGACCAAGACCCCTGAATGTCCATCCCATACCCAG |
| | | CCGCTGGGCGTCTATCTCTTGACTCCCGCAGTACAGGACTTGTGGCTTAGAG |
| | | ATAAGGCCACCTTTACATGTTTCGTCGTGGGCTCTGACCTGAAGGATGCCCA |
| | | TTTGACTTGGGAGGTTGCCGGAAAGGTACCCACAGGGGGGGTTGAGGAAG |
| | | GGTTGCTGGAGCGCCATTCCAATGGCTCTCAGAGCCAGCACTCAAGACTCAC |
| | | CCTTCCGAGATCCCTGTGGAACGCCGGGACCTCTGTCACATGTACTCTAAATC |
| | | ATCCTAGCCTGCCCCCACAGCGTCTGATGGCCCTTAGAGAGCCAGCCGCCCA |
| | | GGCACCAGTTAAGCTTAGCCTGAATCTGCTCGCCAGTAGTGATCCCCCAGAG |
| | | GCCGCCAGCTGGCTCTTATGCGAAGTGTCCGGCTTTAGCCCGCCCAACATCT |
| | | TGCTCATGTGGCTGGAGGACCAGCGAGAAGTGAACACCAGCGGCTTCGCTC |
| | | CAGCCCGGCCCCCACCCCAGCCGGGTTCTACCACATTCTGGGCCTGGAGTGT |
| | | CTTAAGGGTCCCAGCACCACCTAGCCCCCAGCCAGCCACATACACCTGTGTT |
| | | GTGTCCCATGAAGATAGCAGGACCCTGCTAAATGCTTCTAGGAGTCTGGAG |
| | | GTTTCCTACGTGACTGACCATT |
| 10 | GS | GGGGSGGGGS |
| | hinge/linker | |
| | (aa) | |
| 11 | GS | GGTGGCGGAGGTTCTGGAGGTGGAGGTTCC |
| | hinge/linker | |
| | (na) | |
| 12 | CD8TM (aa) | IYIWAPLAGTCGVLLLSLVITLYC |
| 13 | CD8TM (na) | ATCTACATCTGGGCGCCCTTGGCCGGGACTTGTGGGGTCCTTCTCCTGTCACT |
| | | GGTTATCACCCTTTACTGC |
| 14 | 4-1BB | KRGRKKLLYIFKQPFMRPVQTTQEEDGCSCRFPEEEEGGCEL |
| | intracellular | |
| | domain (aa) | |
| 15 | 4-1BB | AAACGGGGCAGAAAGAAACTCCTGTATATATTCAAACAACCATTTATGAGAC |
| | intracellular | CAGTACAAACTACTCAAGAGGAAGATGGCTGTAGCTGCCGATTTCCAGAAG |
| | domain (na) | AAGAAGAAGGAGGATGTGAACTG |
| 16 | CD27 (aa) | QRRKYRSNKGESPVEPAEPCRYSCPREEEGSTIPIQEDYRKPEPACSP |
| 17 | CD27 (na) | AGGAGTAAGAGGAGCAGGCTCCTGCACAGTGACTACATGAACATGACTCCC |
| | | CGCCGCCCCGGGCCCACCCGCAAGCATTACCAGCCCTATGCCCCACCACGCG |
| | | ACTTCGCAGCCTATCGCTCC |
| 18 | CD3-zeta | RVKFSRSADAPAYKQGQNQLYNELNLGRREEYDVLDKRRGRDPEMGGKPRRK |
| | (aa) | NPQEGLYNELQKDKMAEAYSEIGMKGERRRGKGHDGLYQGLSTATKDTYDAL |
| | | HMQALPPR |
| 19 | CD3-zeta | AGAGTGAAGTTCAGCAGGAGCGCAGACGCCCCCGCGTACAAGCAGGGCCA |
| | (na) | GAACCAGCTCTATAACGAGCTCAATCTAGGACGAAGAGAGGAGTACGATGT |
| | | TTTGGACAAGAGACGTGGCCGGGACCCTGAGATGGGGGGAAAGCCGAGAA |
| | | GGAAGAACCCTCAGGAAGGCCTGTACAATGAACTGCAGAAAGATAAGATGG |
| | | CGGAGGCCTACAGTGAGATTGGGATGAAAGGCGAGCGCCGGAGGGGCAAG |
| | | GGGCACGATGGCCTTTACCAGGGTCTCAGTACAGCCACCAAGGACACCTAC |
| | | GACGCCCTTCACATGCAGGCCCTGCCCCCTCGC |
| 20 | CD3-zeta | RVKFSRSADAPAYQQGQNQLYNELNLGRREEYDVLDKRRGRDPEMGGKPRRK |
| | (aa) | NPQEGLYNELQKDKMAEAYSEIGMKGERRRGKGHDGLYQGLSTATKDTYDAL |
| | | HMQALPPR |
| 21 | CD3-zeta | AGAGTGAAGTTCAGCAGGAGCGCAGACGCCCCCGCGTACCAGCAGGGCCA |
| | (na) | GAACCAGCTCTATAACGAGCTCAATCTAGGACGAAGAGAGGAGTACGATGT |
| | | TTTGGACAAGAGACGTGGCCGGGACCCTGAGATGGGGGGAAAGCCGAGAA |
| | | GGAAGAACCCTCAGGAAGGCCTGTACAATGAACTGCAGAAAGATAAGATGG |
| | | CGGAGGCCTACAGTGAGATTGGGATGAAAGGCGAGCGCCGGAGGGGCAAG |
| | | GGGCACGATGGCCTTTACCAGGGTCTCAGTACAGCCACCAAGGACACCTAC |
| | | GACGCCCTTCACATGCAGGCCCTGCCCCCTCGC |
| 22 | linker | GGGGS |
| 23 | linker | GGTGGCGGAGGTTCTGGAGGTGGAGGTTCC |
| 28 | linker | (Gly-Gly-Gly-Ser)n, where n = 1-10 |
| 29 | linker | (Gly4 Ser)4 |
| 30 | linker | (Gly4 Ser)3 |
| 31 | linker | (Gly3Ser) |
| 32 | polyA | A₂₀₀₀ |
| 33 | polyA | A₁₅₀ |
| 34 | polyA | A₅₀₀₀ |
| 35 | polyT | T₁₀₀ |
| 36 | polyT | T₅₀₀₀ |
| 37 | polyA | A₆₄ |
| 38 | polyA | A₄₀₀ |

### Combination of CARs

[0197] In one aspect, the CAR-expressing cell described herein can further comprise a second CAR, e.g., a second CAR that includes a different antigen binding domain, e.g., to the same target or a different target (e.g., a target other than a cancer associated antigen described herein or a different cancer associated antigen described herein, e.g., CD19, CD33, CLL-1, CD34, FLT3, or folate receptor beta). In one embodiment, the second CAR includes an antigen binding domain to a target expressed the same cancer cell type as the cancer associated antigen. In one embodiment, the CAR-expressing cell comprises a first CAR that targets a first antigen and includes an intracellular signaling domain having a costimulatory signaling domain but not a primary signaling domain, and a second CAR that targets a second, different, antigen and includes an intracellular signaling domain having a primary signaling domain but not a costimulatory signaling domain. While not wishing to be bound by theory, placement of a costimulatory signaling domain, e.g., 4-1BB, CD28, ICOS, CD27 or OX-40, onto the first CAR, and the primary signaling domain, e.g., CD3 zeta, on the second CAR can limit the CAR activity to cells where both targets are expressed. In one embodiment, the CAR expressing cell comprises a first cancer associated antigen CAR that includes an antigen binding domain that binds a target antigen described herein, a transmembrane domain and a costimulatory domain and a second CAR that targets a different target antigen (e.g., an antigen expressed on that same cancer cell type as the first target antigen) and includes an antigen binding domain, a transmembrane domain and a primary signaling domain. In another embodiment, the CAR expressing cell comprises a first CAR that includes an antigen binding domain that binds a target antigen described herein, a transmembrane domain and a primary signaling domain and a second CAR that targets an antigen other than the first target antigen (e.g., an antigen expressed on the same cancer cell type as the first target antigen) and includes an antigen binding domain to the antigen, a transmembrane domain and a costimulatory signaling domain.

[0198] In one embodiment, the CAR-expressing cell comprises a CAR described herein (e.g., a CD19 CAR) and an inhibitory CAR. In one embodiment, the inhibitory CAR comprises an antigen binding domain that binds an antigen found on normal cells but not cancer cells, e.g., normal cells that also express CLL. In one embodiment, the inhibitory CAR comprises the antigen binding domain, a transmembrane domain and an intracellular domain of an inhibitory molecule. For example, the intracellular domain of the inhibitory CAR can be an intracellular domain of PD1, PD-L1, PD-L2, CTLA4, TIM3, CEACAM (e.g., CEACAM-1, CEACAM-3 and/or CEACAM-5), LAGS, VISTA, BTLA, TIGIT, LAIR1, CD160, 2B4, CD80, CD86, B7-H3 (CD276), B7-H4 (VTCN1), HVEM (TNFRSF14 or CD270), KIR, A2aR, MHC class I, MHC class II, GAL9, adenosine, and TGFR (e.g., TGFRbeta).

[0199] In one embodiment, when the CAR-expressing cell comprises two or more different CARs, the antigen binding domains of the different CARs can be such that the antigen binding domains do not interact with one another. For example, a cell expressing a first and second CAR can have an antigen binding domain of the first CAR, e.g., as a fragment, e.g., an scFv, that does not form an association with the antigen binding domain of the second CAR, e.g., the antigen binding domain of the second CAR is a VHH.
[0200] n some embodiments, when present on the surface of a cell, binding of the antigen binding domain of the first CAR to its cognate antigen is not substantially reduced by the presence of the second CAR. In some embodiments, binding of the antigen binding domain of the first CAR to its cognate antigen in the presence of the second CAR is 85%, 90%, 95%, 96%, 97%, 98% or 99% of binding of the antigen binding domain of the first CAR to its cognate antigen in the absence of the second CAR.

[0201] In some embodiments, when present on the surface of a cell, the antigen binding domains of the first CAR said second CAR, associate with one another less than if both were scFv antigen binding domains. In some embodiments, the antigen binding domains of the first CAR and the second CAR, associate with one another 85%, 90%, 95%, 96%, 97%, 98% or 99% less than if both were scFv antigen binding domains.

### CAR-Expressing Cells

[0202] The CARs described herein are expressed on cells, e.g., immune effector cells, e.g., T cells. For example, a nucleic acid construct of a CAR described herein is transduced to a T cell. In embodiments, the cells expressing the CARs described herein are an in vitro transcribed RNA CAR T cell.

### Sources of Cells, e.g., T Cells

[0203] Prior to expansion and genetic modification or other modification, a source of cells, e.g., immune effector cells, e.g., T cells or NK cells, can be obtained from a subject. Examples of subjects include humans, monkeys, chimpanzees, dogs, cats, mice, rats, and transgenic species thereof. T cells can be obtained from a number of sources, including peripheral blood mononuclear cells, bone marrow, lymph node tissue, cord blood, thymus tissue, tissue from a site of infection, ascites, pleural effusion, spleen tissue, and tumors. In some embodiments, the cells obtained as described in this section are subjected to an assay described herein.

[0204] In certain aspects of the present disclosure, immune effector cells, e.g., T cells or NK cells, can be obtained from a unit of blood collected from a subject using any number of techniques known to the skilled artisan, such as Ficoll™ separation. In one aspect, cells from the circulating blood of an individual are obtained by apheresis. The apheresis product typically contains lymphocytes, including T cells, monocytes, granulocytes, B cells, other nucleated white blood cells, red blood cells, and platelets. In one aspect, the cells collected by apheresis may be washed to remove the plasma fraction and, optionally, to place the cells in an appropriate buffer or media for subsequent processing steps. In one embodiment, the cells are washed with phosphate buffered saline (PBS). In an alternative embodiment, the wash solution lacks calcium and may lack magnesium or may lack many if not all divalent cations.

[0205] Initial activation steps in the absence of calcium can lead to magnified activation. As those of ordinary skill in the art would readily appreciate a washing step may be accomplished by methods known to those in the art, such as by using a semi-automated “flow-through” centrifuge (for example, the Cobe 2991 cell processor, the Baxter CytoMate, or the Haemonetics Cell Saver 5) according to the manufacturer's instructions. After washing, the cells may be resuspended in a variety of biocompatible buffers, such as, for example, Ca-free, Mg-free PBS, PlasmaLyte A, or other saline solution with or without buffer. Alternatively, the undesirable components of the apheresis sample may be removed and the cells directly resuspended in culture media.

[0206] It is recognized that the methods of the application can utilize culture media conditions comprising 5% or less, for example 2%, human AB serum, and employ known culture media conditions and compositions, for example those described in Smith et al., “Ex vivo expansion of human T cells for adoptive immunotherapy using the novel Xeno-free CTS Immune Cell Serum Replacement” Clinical & Translational Immunology (2015) 4, e31; doi:10.1038/cti.2014.31.

[0207] In one aspect, T cells are isolated from peripheral blood lymphocytes by lysing the red blood cells and depleting the monocytes, for example, by centrifugation through a PERCOLL™ gradient or by counterflow centrifugal elutriation.

[0208] The methods described herein can include, e.g., selection of a specific subpopulation of immune effector cells, e.g., T cells, that are a T regulatory cell-depleted population, CD25+ depleted cells, using, e.g., a negative selection technique, e.g., described herein. In embodiments, the population of T regulatory depleted cells contains less than 30%, 25%, 20%, 15%, 10%, 5%, 4%, 3%, 2%, 1% of CD25+ cells.

[0209] In one embodiment, T regulatory cells, e.g., CD25+ T cells, are removed from the population using an anti-CD25 antibody, or fragment thereof, or a CD25-binding ligand, e.g., IL-2. In one embodiment, the anti-CD25 antibody, or fragment thereof, or CD25-binding ligand is conjugated to a substrate, e.g., a bead, or is otherwise coated on a substrate, e.g., a bead. In one embodiment, the anti-CD25 antibody, or fragment thereof, is conjugated to a substrate as described herein.

[0210] In one embodiment, the T regulatory cells, e.g., CD25+ T cells, are removed from the population using CD25 depletion reagent from Miltenyi™. In one embodiment, the ratio of cells to CD25 depletion reagent is 1e7 cells to 20 uL, or 1e7 cells to15 uL, or 1e7 cells to 10 uL, or 1e7 cells to 5 uL, or 1e7 cells to 2.5 uL, or 1e7 cells to 1.25 uL. In one embodiment, e.g., for T regulatory cells, e.g., CD25+ depletion, greater than 500 million cells/ml is used. In a further aspect, a concentration of cells of 600, 700, 800, or 900 million cells/ml is used.

[0211] In one embodiment, the population of immune effector cells to be depleted includes about 6×10⁹ CD25+ T cells. In other aspects, the population of immune effector cells to be depleted include about 1×10⁹ to 1×10¹⁰ CD25+ T cell, and any integer value in between. In one embodiment, the resulting population T regulatory depleted cells has 2×10⁹ T regulatory cells, e.g., CD25+ cells, or less (e.g., 1×10⁹, 5×10⁸, 1×10⁸, 5×10⁷, 1×10⁷, or less CD25+ cells).

[0212] In one embodiment, the T regulatory cells, e.g., CD25+ cells, are removed from the population using the CliniMAC system with a depletion tubing set, such as, e.g., tubing 162-01. In one embodiment, the CliniMAC system is run on a depletion setting such as, e.g., DEPLETION2.1.

[0213] Without wishing to be bound by a particular theory, decreasing the level of negative regulators of immune cells (e.g., decreasing the number of unwanted immune cells, e.g., T_{REG} cells), in a subject prior to apheresis or during manufacturing of a CAR-expressing cell product can reduce the risk of subject relapse. In an embodiment, a patient is pre-treated with one or more therapies that reduce T_{REG} cells prior to collection of cells for CAR-expressing cell (e.g., T cell, NK cell) product manufacturing, thereby reducing the risk of patient relapse to CAR-expressing cell (e.g., T cell, NK cell) treatment (e.g., CTL019 treatment). Methods of depleting T_{REG} cells are known in the art. Methods of decreasing T_{REG} cells include, but are not limited to, cyclophosphamide, anti-GITR antibody, CD25-depletion, and combinations thereof.

[0214] In some embodiments, the manufacturing methods comprise reducing the number of (e.g., depleting) T_{REG} cells prior to manufacturing of the CAR-expressing cell. For example, manufacturing methods comprise contacting the sample, e.g., the apheresis sample, with an anti-GITR antibody and/or an anti-CD25 antibody (or fragment thereof, or a CD25-binding ligand), e.g., to deplete T_{REG} cells prior to manufacturing of the CAR-expressing cell (e.g., T cell, NK cell) product.

[0215] In an embodiment, a patient is pre-treated with cyclophosphamide prior to collection of cells for CAR-expressing cell (e.g., T cell, NK cell) product manufacturing, thereby reducing the risk of patient relapse to CAR-expressing cell treatment (e.g., CTL019 treatment). In an embodiment, a patient is pre-treated with an anti-GITR antibody prior to collection of cells for CAR-expressing cell (e.g., T cell, NK cell) product manufacturing, thereby reducing the risk of patient relapse to CAR-expressing cell treatment (e.g., CTL019 treatment).

[0216] In an embodiment, the CAR-expressing cell (e.g., T cell, NK cell) manufacturing process is modified to deplete T_{REG} cells prior to manufacturing of the CAR-expressing cell (e.g., T cell, NK cell) product (e.g., a CTL019 product). In an embodiment, CD25-depletion is used to deplete T_{REG} cells prior to manufacturing of the CAR-expressing cell (e.g., T cell, NK cell) product (e.g., a CTL019 product).

[0217] The methods described herein can include more than one selection step, e.g., more than one depletion step. Enrichment of a T cell population by negative selection can be accomplished, e.g., with a combination of antibodies directed to surface markers unique to the negatively selected cells. One method is cell sorting and/or selection via negative magnetic immunoadherence or flow cytometry that uses a cocktail of monoclonal antibodies directed to cell surface markers present on the cells negatively selected. For example, to enrich for CD4+ cells by negative selection, a monoclonal antibody cocktail can include antibodies to CD14, CD20, CD11b, CD16, HLA-DR, and CD8.

[0218] The methods described herein can further include removing cells from the population which express a tumor antigen, e.g., a tumor antigen that does not comprise CD25, e.g., CD19, CD30, CD38, CD123, CD20, CD14 or CD11b, to thereby provide a population of T regulatory depleted, e.g., CD25+ depleted, and tumor antigen depleted cells that are suitable for expression of a CAR, e.g., a CAR described herein. In one embodiment, tumor antigen expressing cells are removed simultaneously with the T regulatory, e.g., CD25+ cells. For example, an anti-CD25 antibody, or fragment thereof, and an anti-tumor antigen antibody, or fragment thereof, can be attached to the same substrate, e.g., bead, which can be used to remove the cells or an anti-CD25 antibody, or fragment thereof, or the anti-tumor antigen antibody, or fragment thereof, can be attached to separate beads, a mixture of which can be used to remove the cells. In other embodiments, the removal of T regulatory cells, e.g., CD25+ cells, and the removal of the tumor antigen expressing cells is sequential, and can occur, e.g., in either order.

[0219] Also provided are methods that include removing cells from the population which express a check point inhibitor, e.g., a check point inhibitor described herein, e.g., one or more of PD1+ cells, LAG3+ cells, and TIM3+ cells, to thereby provide a population of T regulatory depleted, e.g., CD25+ depleted cells, and check point inhibitor depleted cells, e.g., PD1+, LAG3+ and/or TIM3+ depleted cells. Exemplary check point inhibitors include B7-H1, B&-1, CD160, P1H, 2B4, PD1, TIM3, CEACAM (e.g., CEACAM-1, CEACAM-3 and/or CEACAM-5), LAG3, TIGIT, CTLA-4, BTLA and LAIR1. In one embodiment, check point inhibitor expressing cells are removed simultaneously with the T regulatory, e.g., CD25+ cells. For example, an anti-CD25 antibody, or fragment thereof, and an anti-check point inhibitor antibody, or fragment thereof, can be attached to the same bead which can be used to remove the cells, or an anti-CD25 antibody, or fragment thereof, and the anti-check point inhibitor antibody, or fragment there, can be attached to separate beads, a mixture of which can be used to remove the cells. In other embodiments, the removal of T regulatory cells, e.g., CD25+ cells, and the removal of the check point inhibitor expressing cells is sequential, and can occur, e.g., in either order.

[0220] Methods described herein can include a positive selection step. For example, T cells can isolated by incubation with anti-CD3/anti-CD28 (e.g., 3×28)-conjugated beads, such as DYNABEADS® M-450 CD3/CD28 T, for a time period sufficient for positive selection of the desired T cells. In one embodiment, the time period is about 30 minutes. In a further embodiment, the time period ranges from 30 minutes to 36 hours or longer and all integer values there between. In a further embodiment, the time period is at least 1, 2, 3, 4, 5, or 6 hours. In yet another embodiment, the time period is 10 to 24 hours, e.g., 24 hours. Longer incubation times may be used to isolate T cells in any situation where there are few T cells as compared to other cell types, such in isolating tumor infiltrating lymphocytes (TIL) from tumor tissue or from immunocompromised individuals. Further, use of longer incubation times can increase the efficiency of capture of CD8+ T cells. Thus, by simply shortening or lengthening the time T cells are allowed to bind to the CD3/CD28 beads and/or by increasing or decreasing the ratio of beads to T cells (as described further herein), subpopulations of T cells can be preferentially selected for or against at culture initiation or at other time points during the process. Additionally, by increasing or decreasing the ratio of anti-CD3 and/or anti-CD28 antibodies on the beads or other surface, subpopulations of T cells can be preferentially selected for or against at culture initiation or at other desired time points.

[0221] In one embodiment, a T cell population can be selected that expresses one or more of IFN-^{γ}, TNFα, IL-17A, IL-2, IL-3, IL-4, IL-5, IL-6, IL-9, IL-21, CCL20,GM-CSF, IL-10, IL-13, granzyme B, and perforin, or other appropriate molecules, e.g., other cytokines. Methods for screening for cell expression can be determined, e.g., by the methods described in PCT Publication No.: WO 2013/126712. In an embodiment, the T cell population expresses cytokine CCL20, IL-17a, IL-6, and combinations thereof.

[0222] For isolation of a desired population of cells by positive or negative selection, the concentration of cells and surface (e.g., particles such as beads) can be varied. In certain aspects, it may be desirable to significantly decrease the volume in which beads and cells are mixed together (e.g., increase the concentration of cells), to ensure maximum contact of cells and beads. For example, in one aspect, a concentration of 10 billion cells/ml, 9 billion/ml, 8 billion/ml, 7 billion/ml, 6 billion/ml, or 5 billion/ml is used. In one aspect, a concentration of 1 billion cells/ml is used. In yet one aspect, a concentration of cells from 75, 80, 85, 90, 95, or 100 million cells/ml is used. In further aspects, concentrations of 125 or 150 million cells/ml can be used.

[0223] Using high concentrations can result in increased cell yield, cell activation, and cell expansion. Further, use of high cell concentrations allows more efficient capture of cells that may weakly express target antigens of interest, such as CD28-negative T cells, or from samples where there are many tumor cells present (e.g., leukemic blood, tumor tissue, etc.). Such populations of cells may have therapeutic value and would be desirable to obtain. For example, using high concentration of cells allows more efficient selection of CD8+ T cells that normally have weaker CD28 expression.

[0224] In a related aspect, it may be desirable to use lower concentrations of cells. By significantly diluting the mixture of T cells and surface (e.g., particles such as beads), interactions between the particles and cells is minimized. This selects for cells that express high amounts of desired antigens to be bound to the particles. For example, CD4+ T cells express higher levels of CD28 and are more efficiently captured than CD8+ T cells in dilute concentrations. In one aspect, the concentration of cells used is 5×10⁶/ml. In other aspects, the concentration used can be from about 1×10⁵/ml to 1×10⁶/ml, and any integer value in between.

[0225] In other aspects, the cells may be incubated on a rotator for varying lengths of time at varying speeds at either 2-10° C. or at room temperature.

[0226] T cells for stimulation can also be frozen after a washing step. Wishing not to be bound by theory, the freeze and subsequent thaw step provides a more uniform product by removing granulocytes and to some extent monocytes in the cell population. After the washing step that removes plasma and platelets, the cells may be suspended in a freezing solution. While many freezing solutions and parameters are known in the art and will be useful in this context, one method involves using PBS containing 20% DMSO and 8% human serum albumin, or culture media containing 10% Dextran 40 and 5% Dextrose, 20% Human Serum Albumin and 7.5% DMSO, or 31.25% Plasmalyte-A, 31.25% Dextrose 5%, 0.45% NaCl, 10% Dextran 40 and 5% Dextrose, 20% Human Serum Albumin, and 7.5% DMSO or other suitable cell freezing media containing for example, Hespan and PlasmaLyte A, the cells then are frozen to −80° C. at a rate of 1° per minute and stored in the vapor phase of a liquid nitrogen storage tank. Other methods of controlled freezing may be used as well as uncontrolled freezing immediately at −20° C. or in liquid nitrogen.

[0227] In certain aspects, cryopreserved cells are thawed and washed as described herein and allowed to rest for one hour at room temperature prior to activation using the methods of the present invention.

[0228] Also contemplated in the context of the invention is the collection of blood samples or apheresis product from a subject at a time period prior to when the expanded cells as described herein might be needed. As such, the source of the cells to be expanded can be collected at any time point necessary, and desired cells, such as T cells, isolated and frozen for later use in immune effector cell therapy for any number of diseases or conditions that would benefit from immune effector cell therapy, such as those described herein. In one aspect a blood sample or an apheresis is taken from a generally healthy subject. In certain aspects, a blood sample or an apheresis is taken from a generally healthy subject who is at risk of developing a disease, but who has not yet developed a disease, and the cells of interest are isolated and frozen for later use. In certain aspects, the T cells may be expanded, frozen, and used at a later time. In certain aspects, samples are collected from a patient shortly after diagnosis of a particular disease as described herein but prior to any treatments. In a further aspect, the cells are isolated from a blood sample or an apheresis from a subject prior to any number of relevant treatment modalities, including but not limited to treatment with agents such as natalizumab, efalizumab, antiviral agents, chemotherapy, radiation, immunosuppressive agents, such as cyclosporin, azathioprine, methotrexate, mycophenolate, and FK506, antibodies, or other immunoablative agents such as CAMPATH, anti-CD3 antibodies, cytoxan, fludarabine, cyclosporin, FK506, rapamycin, mycophenolic acid, steroids, FR901228, and irradiation.

[0229] In a further aspect of the present invention, T cells are obtained from a patient directly following treatment that leaves the subject with functional T cells. In this regard, it has been observed that following certain cancer treatments, in particular treatments with drugs that damage the immune system, shortly after treatment during the period when patients would normally be recovering from the treatment, the quality of T cells obtained may be optimal or improved for their ability to expand ex vivo Likewise, following ex vivo manipulation using the methods described herein, these cells may be in a preferred state for enhanced engraftment and in vivo expansion. Thus, it is contemplated within the context of the present invention to collect blood cells, including T cells, dendritic cells, or other cells of the hematopoietic lineage, during this recovery phase. Further, in certain aspects, mobilization (for example, mobilization with GM-CSF) and conditioning regimens can be used to create a condition in a subject wherein repopulation, recirculation, regeneration, and/or expansion of particular cell types is favored, especially during a defined window of time following therapy. Illustrative cell types include T cells, B cells, dendritic cells, and other cells of the immune system.

[0230] In one embodiment, the immune effector cells expressing a CAR molecule, e.g., a CAR molecule described herein, are obtained from a subject that has received a low, immune enhancing dose of an mTOR inhibitor. In an embodiment, the population of immune effector cells, e.g., T cells, to be engineered to express a CAR, are harvested after a sufficient time, or after sufficient dosing of the low, immune enhancing, dose of an mTOR inhibitor, such that the level of PD1 negative immune effector cells, e.g., T cells, or the ratio of PD1 negative immune effector cells, e.g., T cells/PD1 positive immune effector cells, e.g., T cells, in the subject or harvested from the subject has been, at least transiently, increased.

[0231] In other embodiments, population of immune effector cells, e.g., T cells, which have, or will be engineered to express a CAR, can be treated ex vivo by contact with an amount of an mTOR inhibitor that increases the number of PD1 negative immune effector cells, e.g., T cells or increases the ratio of PD1 negative immune effector cells, e.g., T cells/PD1 positive immune effector cells, e.g., T cells.

[0232] In one embodiment, a T cell population is diacylglycerol kinase (DGK)-deficient. DGK-deficient cells include cells that do not express DGK RNA or protein, or have reduced or inhibited DGK activity. DGK-deficient cells can be generated by genetic approaches, e.g., administering RNA-interfering agents, e.g., siRNA, shRNA, miRNA, to reduce or prevent DGK expression. Alternatively, DGK-deficient cells can be generated by treatment with DGK inhibitors described herein.

[0233] In one embodiment, a T cell population is Ikaros-deficient. Ikaros-deficient cells include cells that do not express Ikaros RNA or protein, or have reduced or inhibited Ikaros activity, Ikaros-deficient cells can be generated by genetic approaches, e.g., administering RNA-interfering agents, e.g., siRNA, shRNA, miRNA, to reduce or prevent Ikaros expression. Alternatively, Ikaros-deficient cells can be generated by treatment with Ikaros inhibitors, e.g., lenalidomide.

[0234] In embodiments, a T cell population is DGK-deficient and Ikaros-deficient, e.g., does not express DGK and Ikaros, or has reduced or inhibited DGK and Ikaros activity. Such DGK and Ikaros-deficient cells can be generated by any of the methods described herein.

### Allogeneic CAR

[0235] In embodiments described herein, the immune effector cell can be an allogeneic immune effector cell, e.g., T cell. For example, the cell can be an allogeneic T cell, e.g., an allogeneic T cell lacking expression of a functional T cell receptor (TCR) and/or human leukocyte antigen (HLA), e.g., HLA class I and/or HLA class II.

[0236] A T cell lacking a functional TCR can be, e.g., engineered such that it does not express any functional TCR on its surface, engineered such that it does not express one or more subunits that comprise a functional TCR (e.g., engineered such that it does not express (or exhibits reduced expression) of TCR alpha, TCR beta, TCR gamma, TCR delta, TCR epsilon, and/or TCR zeta) or engineered such that it produces very little functional TCR on its surface. Alternatively, the T cell can express a substantially impaired TCR, e.g., by expression of mutated or truncated forms of one or more of the subunits of the TCR. The term “substantially impaired TCR” means that this TCR will not elicit an adverse immune reaction in a host.

[0237] A T cell described herein can be, e.g., engineered such that it does not express a functional HLA on its surface. For example, a T cell described herein, can be engineered such that cell surface expression HLA, e.g., HLA class 1 and/or HLA class II, is downregulated. In some embodiments, downregulation of HLA may be accomplished by reducing or eliminating expression of beta-2 microglobulin (B2M).

[0238] In some embodiments, the T cell can lack a functional TCR and a functional HLA, e.g., HLA class I and/or HLA class II.

[0239] Modified T cells that lack expression of a functional TCR and/or HLA can be obtained by any suitable means, including a knock out or knock down of one or more subunit of TCR or HLA. For example, the T cell can include a knock down of TCR and/or HLA using siRNA, shRNA, clustered regularly interspaced short palindromic repeats (CRISPR) transcription-activator like effector nuclease (TALEN), or zinc finger endonuclease (ZFN).

[0240] In some embodiments, the allogeneic cell can be a cell which does not expresses or expresses at low levels an inhibitory molecule, e.g. by any method described herein. For example, the cell can be a cell that does not express or expresses at low levels an inhibitory molecule, e.g., that can decrease the ability of a CAR-expressing cell to mount an immune effector response. Examples of inhibitory molecules include PD1, PD-L1, PD-L2, CTLA4, TIM3, CEACAM (e.g., CEACAM-1, CEACAM-3 and/or CEACAM-5), LAG3, VISTA, BTLA, TIGIT, LAIR1, CD160, 2B4, CD80, CD86, B7-H3 (CD276), B7-H4 (VTCN1), HVEM (TNFRSF14 or CD270), KIR, A2aR, MHC class I, MHC class II, GAL9, adenosine, and TGFR (e.g., TGFRbeta). Inhibition of an inhibitory molecule, e.g., by inhibition at the DNA, RNA or protein level, can optimize a CAR-expressing cell performance. In embodiments, an inhibitory nucleic acid, e.g., an inhibitory nucleic acid, e.g., a dsRNA, e.g., an siRNA or shRNA, a clustered regularly interspaced short palindromic repeats (CRISPR), a transcription-activator like effector nuclease (TALEN), or a zinc finger endonuclease (ZFN), e.g., as described herein, can be used.

siRNA and shRNA to Inhibit TCR or HLA

[0241] In some embodiments, TCR expression and/or HLA expression can be inhibited using siRNA or shRNA that targets a nucleic acid encoding a TCR and/or HLA, and/or an inhibitory molecule described herein (e.g., PD1, PD-L1, PD-L2, CTLA4, TIM3, CEACAM (e.g., CEACAM-1, CEACAM-3 and/or CEACAM-5), LAG3, VISTA, BTLA, TIGIT, LAIR1, CD160, 2B4, CD80, CD86, B7-H3 (CD276), B7-H4 (VTCN1), HVEM (TNFRSF14 or CD270), KIR, A2aR, MHC class I, MHC class II, GAL9, adenosine, and TGFR beta), in a cell, e.g., T cell.

[0242] Expression systems for siRNA and shRNAs, and exemplary shRNAs, are described, e.g., in paragraphs 649 and 650 of International Application WO2015/142675, filed Mar. 13, 2015, which is incorporated by reference in its entirety.

### CRISPR to Inhibit TCR or HLA

[0243] “CRISPR” or “CRISPR to TCR and/or HLA” or “CRISPR to inhibit TCR and/or HLA” as used herein refers to a set of clustered regularly interspaced short palindromic repeats, or a system comprising such a set of repeats. “Cas”, as used herein, refers to a CRISPR-associated protein. A “CRISPR/Cas” system refers to a system derived from CRISPR and Cas which can be used to silence or mutate a TCR and/or HLA gene, and/or an inhibitory molecule described herein (e.g., PD1, PD-L1, PD-L2, CTLA4, TIM3, CEACAM (e.g., CEACAM-1, CEACAM-3 and/or CEACAM-5), LAG3, VISTA, BTLA, TIGIT, LAIR1, CD160, 2B4, CD80, CD86, B7-H3 (CD276), B7-H4 (VTCN1), HVEM (TNFRSF14 or CD270), KIR, A2aR, MHC class I, MHC class II, GAL9, adenosine, and TGFR beta), in a cell, e.g., T cell.

[0244] The CRISPR/Cas system, and uses thereof, are described, e.g., in paragraphs 651-658 of International Application WO2015/142675, filed Mar. 13, 2015, which is incorporated by reference in its entirety.

TALEN to Inhibit TCR and/or HLA

[0245] “TALEN” or “TALEN to HLA and/or TCR” or “TALEN to inhibit HLA and/or TCR” refers to a transcription activator-like effector nuclease, an artificial nuclease which can be used to edit the HLA and/or TCR gene, and/or an inhibitory molecule described herein (e.g., PD1, PD-L1, PD-L2, CTLA4, TIM3, CEACAM (e.g., CEACAM-1, CEACAM-3 and/or CEACAM-5), LAG3, VISTA, BTLA, TIGIT, LAIR1, CD160, 2B4, CD80, CD86, B7-H3 (CD276), B7-H4 (VTCN1), HVEM (TNFRSF14 or CD270), KIR, A2aR, MHC class I, MHC class II, GAL9, adenosine, and TGFR beta), in a cell, e.g., T cell.

[0246] TALENs, and uses thereof, are described, e.g., in paragraphs 659-665 of International Application WO2015/142675, filed Mar. 13, 2015, which is incorporated by reference in its entirety.

Zinc Finger Nuclease to Inhibit HLA and/or TCR

[0247] “ZFN” or “Zinc Finger Nuclease” or “ZFN to HLA and/or TCR” or “ZFN to inhibit HLA and/or TCR” refer to a zinc finger nuclease, an artificial nuclease which can be used to edit the HLA and/or TCR gene, and/or an inhibitory molecule described herein (e.g., PD1, PD-L1, PD-L2, CTLA4, TIM3, CEACAM (e.g., CEACAM-1, CEACAM-3 and/or CEACAM-5), LAG3, VISTA, BTLA, TIGIT, LAIR1, CD160, 2B4, CD80, CD86, B7-H3 (CD276), B7-H4 (VTCN1), HVEM (TNFRSF14 or CD270), KIR, A2aR, MHC class I, MHC class II, GAL9, adenosine, and TGFR beta), in a cell, e.g., T cell.

[0248] ZFNs, and uses thereof, are described, e.g., in paragraphs 666-671 of International Application WO2015/142675, filed Mar. 13, 2015, which is incorporated by reference in its entirety.

### Telomerase Expression

[0249] While not wishing to be bound by any particular theory, in some embodiments, a therapeutic T cell has short term persistence in a patient, due to shortened telomeres in the T cell; accordingly, transfection with a telomerase gene can lengthen the telomeres of the T cell and improve persistence of the T cell in the patient. See Carl June, “Adoptive T cell therapy for cancer in the clinic”, Journal of Clinical Investigation, 117:1466-1476 (2007). Thus, in an embodiment, an immune effector cell, e.g., a T cell, ectopically expresses a telomerase subunit, e.g., the catalytic subunit of telomerase, e.g., TERT, e.g., hTERT. In some aspects, this disclosure provides a method of producing a CAR-expressing cell, comprising contacting a cell with a nucleic acid encoding a telomerase subunit, e.g., the catalytic subunit of telomerase, e.g., TERT, e.g., hTERT. The cell may be contacted with the nucleic acid before, simultaneous with, or after being contacted with a construct encoding a CAR.

[0250] In one aspect, the disclosure features a method of making a population of immune effector cells (e.g., T cells, NK cells). In an embodiment, the method comprises: providing a population of immune effector cells (e.g., T cells or NK cells), contacting the population of immune effector cells with a nucleic acid encoding a CAR; and contacting the population of immune effector cells with a nucleic acid encoding a telomerase subunit, e.g., hTERT, under conditions that allow for CAR and telomerase expression.

[0251] In an embodiment, the nucleic acid encoding the telomerase subunit is DNA. In an embodiment, the nucleic acid encoding the telomerase subunit comprises a promoter capable of driving expression of the telomerase subunit.

[0252] In an embodiment, hTERT has the amino acid sequence of GenBank Protein ID AAC51724.1 (Meyerson et al., “hEST2, the Putative Human Telomerase Catalytic Subunit Gene, Is Up-Regulated in Tumor Cells and during Immortalization” Cell Volume 90, Issue 4, 22 August 1997, Pages 785-795) as set out in SEQ ID NO: 82 herein.

### Activation and Expansion of Immune Effector Cells (e.g., T Cells)

[0253] Immune effector cells such as T cells may be activated and expanded generally using methods as described, for example, in U.S. Pat. Nos. 6,352,694; 6,534,055; 6,905,680; 6,692,964; 5,858,358; 6,887,466; 6,905,681; 7,144,575; 7,067,318; 7,172,869; 7,232,566; 7,175,843; 5,883,223; 6,905,874; 6,797,514; 6,867,041; and U.S. Patent Application Publication No. 20060121005. In some embodiments, immune effector cells are subjected to an assay as described herein before, during, or after activation, or before, during, or after expansion.

[0254] Generally, a population of immune effector cells may be expanded by contact with a surface having attached thereto an agent that stimulates a CD3/TCR complex associated signal and a ligand that stimulates a costimulatory molecule on the surface of the T cells. In particular, T cell populations may be stimulated as described herein, such as by contact with an anti-CD3 antibody, or antigen-binding fragment thereof, or an anti-CD2 antibody immobilized on a surface, or by contact with a protein kinase C activator (e.g., bryostatin) in conjunction with a calcium ionophore. For co-stimulation of an accessory molecule on the surface of the T cells, a ligand that binds the accessory molecule is used. For example, a population of T cells can be contacted with an anti-CD3 antibody and an anti-CD28 antibody, under conditions appropriate for stimulating proliferation of the T cells. To stimulate proliferation of either CD4+ T cells or CD8+ T cells, an anti-CD3 antibody and an anti-CD28 antibody can be used. Examples of an anti-CD28 antibody include 9.3, B-T3, XR-CD28 (Diaclone, Besançon, France) can be used as can other methods commonly known in the art (Berg et al., Transplant Proc. 30(8):3975-3977, 1998; Haanen et al., J. Exp. Med. 190(9):13191328, 1999; Garland et al., J. Immunol Meth. 227(1-2):53-63, 1999).

[0255] In certain aspects, the primary stimulatory signal and the costimulatory signal for the T cell may be provided by different protocols. For example, the agents providing each signal may be in solution or coupled to a surface. When coupled to a surface, the agents may be coupled to the same surface (i.e., in “cis” formation) or to separate surfaces (i.e., in “trans” formation). Alternatively, one agent may be coupled to a surface and the other agent in solution. In one aspect, the agent providing the costimulatory signal is bound to a cell surface and the agent providing the primary activation signal is in solution or coupled to a surface. In certain aspects, both agents can be in solution. In one aspect, the agents may be in soluble form, and then cross-linked to a surface, such as a cell expressing Fc receptors or an antibody or other binding agent which will bind to the agents. In this regard, see for example, U.S. Patent Application Publication Nos. 20040101519 and 20060034810 for artificial antigen presenting cells (aAPCs) that are contemplated for use in activating and expanding T cells in the present invention.

[0256] In one aspect, the two agents are immobilized on beads, either on the same bead, i.e., “cis,” or to separate beads, i.e., “trans.” By way of example, the agent providing the primary activation signal is an anti-CD3 antibody or an antigen-binding fragment thereof and the agent providing the costimulatory signal is an anti-CD28 antibody or antigen-binding fragment thereof; and both agents are co-immobilized to the same bead in equivalent molecular amounts. In one aspect, a 1:1 ratio of each antibody bound to the beads for CD4+ T cell expansion and T cell growth is used. In certain aspects of the present invention, a ratio of anti CD3:CD28 antibodies bound to the beads is used such that an increase in T cell expansion is observed as compared to the expansion observed using a ratio of 1:1. In one particular aspect an increase of from about 1 to about 3 fold is observed as compared to the expansion observed using a ratio of 1:1. In one aspect, the ratio of CD3:CD28 antibody bound to the beads ranges from 100:1 to 1:100 and all integer values there between. In one aspect, more anti-CD28 antibody is bound to the particles than anti-CD3 antibody, i.e., the ratio of CD3:CD28 is less than one. In certain aspects, the ratio of anti CD28 antibody to anti CD3 antibody bound to the beads is greater than 2:1. In one particular aspect, a 1:100 CD3:CD28 ratio of antibody bound to beads is used. In one aspect, a 1:75 CD3:CD28 ratio of antibody bound to beads is used. In a further aspect, a 1:50 CD3:CD28 ratio of antibody bound to beads is used. In one aspect, a 1:30 CD3:CD28 ratio of antibody bound to beads is used. In one preferred aspect, a 1:10 CD3:CD28 ratio of antibody bound to beads is used. In one aspect, a 1:3 CD3:CD28 ratio of antibody bound to the beads is used. In yet one aspect, a 3:1 CD3:CD28 ratio of antibody bound to the beads is used.

[0257] Ratios of particles to cells from 1:500 to 500:1 and any integer values in between may be used to stimulate T cells or other target cells. As those of ordinary skill in the art can readily appreciate, the ratio of particles to cells may depend on particle size relative to the target cell. For example, small sized beads could only bind a few cells, while larger beads could bind many. In certain aspects the ratio of cells to particles ranges from 1:100 to 100:1 and any integer values in-between and in further aspects the ratio comprises 1:9 to 9:1 and any integer values in between, can also be used to stimulate T cells. The ratio of anti-CD3- and anti-CD28-coupled particles to T cells that result in T cell stimulation can vary as noted above, however certain suitable values include 1:100, 1:50, 1:40, 1:30, 1:20, 1:10, 1:9, 1:8, 1:7, 1:6, 1:5, 1:4, 1:3, 1:2, 1:1, 2:1, 3:1, 4:1, 5:1, 6:1, 7:1, 8:1, 9:1, 10:1, and 15:1 with one suitable ratio being at least 1:1 particles per T cell. In one aspect, a ratio of particles to cells of 1:1 or less is used. In one particular aspect, a suitable particle: cell ratio is 1:5. In further aspects, the ratio of particles to cells can be varied depending on the day of stimulation. For example, in one aspect, the ratio of particles to cells is from 1:1 to 10:1 on the first day and additional particles are added to the cells every day or every other day thereafter for up to 10 days, at final ratios of from 1:1 to 1:10 (based on cell counts on the day of addition). In one particular aspect, the ratio of particles to cells is 1:1 on the first day of stimulation and adjusted to 1:5 on the third and fifth days of stimulation. In one aspect, particles are added on a daily or every other day basis to a final ratio of 1:1 on the first day, and 1:5 on the third and fifth days of stimulation. In one aspect, the ratio of particles to cells is 2:1 on the first day of stimulation and adjusted to 1:10 on the third and fifth days of stimulation. In one aspect, particles are added on a daily or every other day basis to a final ratio of 1:1 on the first day, and 1:10 on the third and fifth days of stimulation. One of skill in the art will appreciate that a variety of other ratios may be suitable for use in the present invention. In particular, ratios will vary depending on particle size and on cell size and type. In one aspect, the most typical ratios for use are in the neighborhood of 1:1, 2:1 and 3:1 on the first day.

[0258] In further aspects, the cells, such as T cells, are combined with agent-coated beads, the beads and the cells are subsequently separated, and then the cells are cultured. In an alternative aspect, prior to culture, the agent-coated beads and cells are not separated but are cultured together. In a further aspect, the beads and cells are first concentrated by application of a force, such as a magnetic force, resulting in increased ligation of cell surface markers, thereby inducing cell stimulation.

[0259] By way of example, cell surface proteins may be ligated by allowing paramagnetic beads to which anti-CD3 and anti-CD28 are attached (3×28 beads) to contact the T cells. In one aspect the cells (for example, 10⁴ to 10⁹ T cells) and beads (for example, DYNABEADS® M-450 CD3/CD28 T paramagnetic beads at a ratio of 1:1) are combined in a buffer, for example PBS (without divalent cations such as, calcium and magnesium). Again, those of ordinary skill in the art can readily appreciate any cell concentration may be used. For example, the target cell may be very rare in the sample and comprise only 0.01% of the sample or the entire sample (i.e., 100%) may comprise the target cell of interest. Accordingly, any cell number is within the context of the present invention. In certain aspects, it may be desirable to significantly decrease the volume in which particles and cells are mixed together (i.e., increase the concentration of cells), to ensure maximum contact of cells and particles. For example, in one aspect, a concentration of about 10 billion cells/ml, 9 billion/ml, 8 billion/ml, 7 billion/ml, 6 billion/ml, 5 billion/ml, or 2 billion cells/ml is used. In one aspect, greater than 100 million cells/ml is used. In a further aspect, a concentration of cells of 10, 15, 20, 25, 30, 35, 40, 45, or 50 million cells/ml is used. In yet one aspect, a concentration of cells from 75, 80, 85, 90, 95, or 100 million cells/ml is used. In further aspects, concentrations of 125 or 150 million cells/ml can be used. Using high concentrations can result in increased cell yield, cell activation, and cell expansion. Further, use of high cell concentrations allows more efficient capture of cells that may weakly express target antigens of interest, such as CD28-negative T cells. Such populations of cells may have therapeutic value and would be desirable to obtain in certain aspects. For example, using high concentration of cells allows more efficient selection of CD8+ T cells that normally have weaker CD28 expression.

[0260] In one embodiment, cells transduced with a nucleic acid encoding a CAR, e.g., a CAR described herein, are expanded, e.g., by a method described herein. In one embodiment, the cells are expanded in culture for a period of several hours (e.g., about 2, 3, 4, 5, 6, 7, 8, 9, 10, 15, 18, 21 hours) to about 14 days (e.g., 1, 2, 3, 4, 5, 6, 7, 8, 9, 10, 11, 12, 13 or 14 days). In one embodiment, the cells are expanded for a period of 4 to 9 days. In one embodiment, the cells are expanded for a period of 8 days or less, e.g., 7, 6 or 5 days. In one embodiment, the cells, e.g., a CD19 CAR cell described herein, are expanded in culture for 5 days, and the resulting cells are more potent than the same cells expanded in culture for 9 days under the same culture conditions. Potency can be defined, e.g., by various T cell functions, e.g. proliferation, target cell killing, cytokine production, activation, migration, or combinations thereof. In one embodiment, the cells, e.g., a CD19 CAR cell described herein, expanded for 5 days show at least a one, two, three or four fold increase in cells doublings upon antigen stimulation as compared to the same cells expanded in culture for 9 days under the same culture conditions. In one embodiment, the cells, e.g., the cells expressing a CD19 CAR described herein, are expanded in culture for 5 days, and the resulting cells exhibit higher proinflammatory cytokine production, e.g., IFN-γ and/or GM-CSF levels, as compared to the same cells expanded in culture for 9 days under the same culture conditions. In one embodiment, the cells, e.g., a CD19 CAR cell described herein, expanded for 5 days show at least a one, two, three, four, five, tenfold or more increase in pg/ml of proinflammatory cytokine production, e.g., IFN-γ and/or GM-CSF levels, as compared to the same cells expanded in culture for 9 days under the same culture conditions.

[0261] Several cycles of stimulation may also be desired such that culture time of T cells can be 60 days or more. Conditions appropriate for T cell culture include an appropriate media (e.g., Minimal Essential Media or RPMI Media 1640 or, X-vivo 15, (Lonza)) that may contain factors necessary for proliferation and viability, including serum (e.g., fetal bovine or human serum), interleukin-2 (IL-2), insulin, IFN-γ, IL-4, IL-7, GM-CSF, IL-10, IL-12, IL-15, TGFβ, and TNF-α or any other additives for the growth of cells known to the skilled artisan. Other additives for the growth of cells include, but are not limited to, surfactant, plasmanate, and reducing agents such as N-acetyl-cysteine and 2-mercaptoethanol. Media can include RPMI 1640, AIM-V, DMEM, MEM, α-MEM, F-12, X-Vivo 15, and X-Vivo 20, Optimizer, with added amino acids, sodium pyruvate, and vitamins, either serum-free or supplemented with an appropriate amount of serum (or plasma) or a defined set of hormones, and/or an amount of cytokine(s) sufficient for the growth and expansion of T cells. Antibiotics, e.g., penicillin and streptomycin, are included only in experimental cultures, not in cultures of cells that are to be infused into a subject. The target cells are maintained under conditions necessary to support growth, for example, an appropriate temperature (e.g., 37° C.) and atmosphere (e.g., air plus 5% CO₂).

[0262] In one embodiment, the cells are expanded in an appropriate media (e.g., media described herein) that includes one or more interleukin that result in at least a 200-fold (e.g., 200-fold, 250-fold, 300-fold, 350-fold) increase in cells over a 14 day expansion period, e.g., as measured by a method described herein such as flow cytometry. In one embodiment, the cells are expanded in the presence IL-15 and/or IL-7 (e.g., IL-15 and IL-7).

[0263] In embodiments, methods described herein, e.g., CAR-expressing cell manufacturing methods, comprise removing T regulatory cells, e.g., CD25+ T cells, from a cell population, e.g., using an anti-CD25 antibody, or fragment thereof, or a CD25-binding ligand, IL-2. Methods of removing T regulatory cells, e.g., CD25+ T cells, from a cell population are described herein. In embodiments, the methods, e.g., manufacturing methods, further comprise contacting a cell population (e.g., a cell population in which T regulatory cells, such as CD25+ T cells, have been depleted; or a cell population that has previously contacted an anti-CD25 antibody, fragment thereof, or CD25-binding ligand) with IL-15 and/or IL-7. For example, the cell population (e.g., that has previously contacted an anti-CD25 antibody, fragment thereof, or CD25-binding ligand) is expanded in the presence of IL-15 and/or IL-7.

[0264] In some embodiments a CAR-expressing cell described herein is contacted with a composition comprising a interleukin-15 (IL-15) polypeptide, a interleukin-15 receptor alpha (IL-15Ra) polypeptide, or a combination of both a IL-15 polypeptide and a IL-15Ra polypeptide e.g., hetlL-15, during the manufacturing of the CAR-expressing cell, e.g., ex vivo. In embodiments, a CAR-expressing cell described herein is contacted with a composition comprising a IL-15 polypeptide during the manufacturing of the CAR-expressing cell, e.g., ex vivo. In embodiments, a CAR-expressing cell described herein is contacted with a composition comprising a combination of both a IL-15 polypeptide and a IL-15 Ra polypeptide during the manufacturing of the CAR-expressing cell, e.g., ex vivo. In embodiments, a CAR-expressing cell described herein is contacted with a composition comprising hetlL-15 during the manufacturing of the CAR-expressing cell, e.g., ex vivo.

[0265] In one embodiment the CAR-expressing cell described herein is contacted with a composition comprising hetlL-15 during ex vivo expansion. In an embodiment, the CAR-expressing cell described herein is contacted with a composition comprising an IL-15 polypeptide during ex vivo expansion. In an embodiment, the CAR-expressing cell described herein is contacted with a composition comprising both an IL-15 polypeptide and an IL-15Ra polypeptide during ex vivo expansion. In one embodiment the contacting results in the survival and proliferation of a lymphocyte subpopulation, e.g., CD8+ T cells.

[0266] In one embodiment, the cells are cultured (e.g., expanded, simulated, and/or transduced) in media comprising serum. The serum may be, e.g., human AB serum (hAB). In some embodiments, the hAB serum is present at about 2%, about 5%, about 2-3%, about 3-4%, about 4-5%, or about 2-5%. As shown in Example 15 herein, 2% and 5% serum are each suitable levels that allow for many fold expansion of T cells. Furthermore, as shown in Smith et al., “Ex vivo expansion of human T cells for adoptive immunotherapy using the novel Xeno-free CTS Immune Cell Serum Replacement” Clinical & Translational Immunology (2015) 4, e31; doi:10.1038/cti.2014.31, medium containing 2% human AB serum is suitable for ex vivo expansion of T cells.

[0267] T cells that have been exposed to varied stimulation times may exhibit different characteristics. For example, typical blood or apheresed peripheral blood mononuclear cell products have a helper T cell population (TH, CD4+) that is greater than the cytotoxic or suppressor T cell population (TC, CD8+). Ex vivo expansion of T cells by stimulating CD3 and CD28 receptors produces a population of T cells that prior to about days 8-9 consists predominately of TH cells, while after about days 8-9, the population of T cells comprises an increasingly greater population of TC cells. Accordingly, depending on the purpose of treatment, infusing a subject with a T cell population comprising predominately of TH cells may be advantageous. Similarly, if an antigen-specific subset of TC cells has been isolated it may be beneficial to expand this subset to a greater degree.

[0268] Further, in addition to CD4 and CD8 markers, other phenotypic markers vary significantly, but in large part, reproducibly during the course of the cell expansion process. Thus, such reproducibility enables the ability to tailor an activated T cell product for specific purposes.

[0269] In some embodiments, cells transduced with a nucleic acid encoding a CAR, e.g., a CAR described herein, can be selected for administration based upon, e.g., protein expression levels of one or more of CCL20, GM-CSF, IFNγ, IL-10, IL-13, IL-17a, IL-2, IL-21, IL-4, IL-5, IL-6, IL-9, TNFα and/or combinations thereof. In some embodiments, cells transduced with a nucleic acid encoding a CAR, e.g., a CAR described herein, can be selected for administration based upon, e.g., protein expression levels of CCL20, IL-17a, IL-6 and combinations thereof.

[0270] Once a CAR described herein is constructed, various assays can be used to evaluate the activity of the molecule, such as but not limited to, the ability to expand T cells following antigen stimulation, sustain T cell expansion in the absence of re-stimulation, and anti-cancer activities in appropriate in vitro and animal models. Assays to evaluate the effects of a CAR are described in further detail below.

[0271] Western blot analysis of CAR expression in primary T cells can be used to detect the presence of monomers and dimers, e.g., as described in paragraph 695 of International Application WO2015/142675, filed Mar. 13, 2015, which is herein incorporated by reference in its entirety.

[0272] In vitro expansion of CAR⁺ T cells following antigen stimulation can be measured by flow cytometry. For example, a mixture of CD4⁺ and CD8⁺ T cells are stimulated with aCD3/αCD28 aAPCs followed by transduction with lentiviral vectors expressing GFP under the control of the promoters to be analyzed. Exemplary promoters include the CMV IE gene, EF-1α, ubiquitin C, or phosphoglycerokinase (PGK) promoters. GFP fluorescence is evaluated on day 6 of culture in the CD4⁺ and/or CD8⁺ T cell subsets by flow cytometry. See, e.g., Milone ET AL., MOLECULAR THERAPY 17(8): 1453-1464 (2009). Alternatively, a mixture of CD4⁺ and CD8⁺ T cells are stimulated with αCD3/αCD28 coated magnetic beads on day 0, and transduced with CAR on day 1 using a bicistronic lentiviral vector expressing CAR along with eGFP using a 2A ribosomal skipping sequence. Cultures are re-stimulated with either a cancer associate antigen as described herein⁺ K562 cells (K562-a cancer associate antigen as described herein), wild-type K562 cells (K562 wild type) or K562 cells expressing hCD32 and 4-1BBL in the presence of antiCD3 and anti-CD28 antibody (K562-BBL-3/28) following washing. Exogenous IL-2 is added to the cultures every other day at 100 IU/ml. GFP⁺ T cells are enumerated by flow cytometry using bead-based counting. See, e.g., Milone et al., MOLECULAR THERAPY 17(8): 1453-1464 (2009).

[0273] Sustained CAR⁺ T cell expansion in the absence of re-stimulation can also be measured. See, e.g., Milone et al., MOLECULAR THERAPY 17(8): 1453-1464 (2009). Briefly, mean T cell volume (fl) is measured on day 8 of culture using a Coulter Multisizer III particle counter, a Nexcelom Cellometer Vision or Millipore Scepter, following stimulation with αCD3/αCD28 coated magnetic beads on day 0, and transduction with the indicated CAR on day 1.

[0274] Animal models can also be used to measure a CAR-expressing cell (e.g., T cell, NK cell) activity, e.g., as described in paragraph 698 of International Application WO2015/142675, filed Mar. 13, 2015, which is herein incorporated by reference in its entirety.

[0275] Dose dependent CAR treatment response can be evaluated, e.g., as described in paragraph 699 of International Application WO2015/142675, filed Mar. 13, 2015, which is herein incorporated by reference in its entirety.

[0276] Assessment of cell proliferation and cytokine production has been previously described, e.g., as described in paragraph 700 of International Application WO2015/142675, filed Mar. 13, 2015, which is herein incorporated by reference in its entirety.

[0277] In another embodiment, potency of a cell (e.g., T cell, NK cell) population (e.g. a CAR-expressing cell) product, e.g., a CD19 CAR-expressing cell (e.g., T cell, NK cell) cell product, e.g., CTL019 cells) is assessed using a Luminex® panel of cytokines to determine cytokine expression levels. Cell (e.g., T cell, NK cell) populations (e.g, a manufactured CAR-expressing cell) cell product, e.g., a CD19 CAR-expressing cell product, e.g., CTL019 cells) are activated in vitro by CD19-expressing K562 (K562-19) cells, which mimic CD19-expressing B cells in CLL. Following cell (e.g., T cell, NK cell) activation, cytokine expression profiles are measured in the co-cultured cell media and potency of activated cells (e.g., a CAR-expressing cell product, e.g., a CD19 CAR-expressing cell product, e.g., CTL019 cells) is correlated with expression of different cytokines including, but not limited to CCL-20/MIP-3a, GM-CSF, IFNγ, IL-10, IL-13, IL-17a, IL-2, IL-21, IL-4, IL-5, IL-6, IL-9, TNFα and/or combinations thereof.

[0278] In an embodiment, cytokine expression levels are informative with regards to the potency of a cell (e.g., T cell, NK cell) population (e.g., to kill tumor cells). In an embodiment, cytokine expression levels described herein are used to improve a cell (e.g., T cell, NK cell) population (e.g., a CAR-expressing cell product, e.g., a CD 19 CAR-expressing cell product, e.g., CTL019 cells) prior to infusion in patients. In an embodiment, cytokine expression levels described herein provide an endpoint during optimization of the manufacturing process.

[0279] Cytotoxicity can be assessed by a standard 51Cr-release assay, e.g., as described in paragraph 701 of International Application WO2015/142675, filed Mar. 13, 2015, which is herein incorporated by reference in its entirety.

[0280] Imaging technologies can be used to evaluate specific trafficking and proliferation of CARs in tumor-bearing animal models, e.g., as described in paragraph 702 of International Application WO2015/142675, filed Mar. 13, 2015, which is herein incorporated by reference in its entirety.

[0281] Other assays, including those described in the Example section herein as well as those that are known in the art can also be used to evaluate the CARs described herein.

[0282] Alternatively, or in combination to the methods disclosed herein, methods and compositions for one or more of: detection and/or quantification of CAR-expressing cells (e.g., in vitro or in vivo (e.g., clinical monitoring)); immune cell expansion and/or activation; and/or CAR-specific selection, that involve the use of a CAR ligand, are disclosed. In one exemplary embodiment, the CAR ligand is an antibody that binds to the CAR molecule, e.g., binds to the extracellular antigen binding domain of CAR (e.g., an antibody that binds to the antigen binding domain, e.g., an anti-idiotypic antibody; or an antibody that binds to a constant region of the extracellular binding domain). In other embodiments, the CAR ligand is a CAR antigen molecule (e.g., a CAR antigen molecule as described herein).

[0283] In one aspect, a method for detecting and/or quantifying CAR-expressing cells is disclosed. For example, the CAR ligand can be used to detect and/or quantify CAR-expressing cells in vitro or in vivo (e.g., clinical monitoring of CAR-expressing cells in a patient, or dosing a patient). The method includes:

[0284] providing the CAR ligand (optionally, a labelled CAR ligand, e.g., a CAR ligand that includes a tag, a bead, a radioactive or fluorescent label);

[0285] acquiring the CAR-expressing cell (e.g., acquiring a sample containing CAR-expressing cells, such as a manufacturing sample or a clinical sample);

[0286] contacting the CAR-expressing cell with the CAR ligand under conditions where binding occurs, thereby detecting the level (e.g., amount) of the CAR-expressing cells present. Binding of the CAR-expressing cell with the CAR ligand can be detected using standard techniques such as FACS, ELISA and the like.

[0287] In another aspect, a method of expanding and/or activating cells (e.g., immune effector cells) is disclosed. The method includes:

[0288] providing a CAR-expressing cell (e.g., a first CAR-expressing cell or a transiently expressing CAR cell);

[0289] contacting said CAR-expressing cell with a CAR ligand, e.g., a CAR ligand as described herein), under conditions where immune cell expansion and/or proliferation occurs, thereby producing the activated and/or expanded cell population.

[0290] In certain embodiments, the CAR ligand is present on (e.g., is immobilized or attached to a substrate, e.g., a non-naturally occurring substrate). In some embodiments, the substrate is a non-cellular substrate. The non-cellular substrate can be a solid support chosen from, e.g., a plate (e.g., a microtiter plate), a membrane (e.g., a nitrocellulose membrane), a matrix, a chip or a bead. In embodiments, the CAR ligand is present in the substrate (e.g., on the substrate surface). The CAR ligand can be immobilized, attached, or associated covalently or non-covalently (e.g., cross-linked) to the substrate. In one embodiment, the CAR ligand is attached (e.g., covalently attached) to a bead. In the aforesaid embodiments, the immune cell population can be expanded in vitro or ex vivo. The method can further include culturing the population of immune cells in the presence of the ligand of the CAR molecule, e.g., using any of the methods described herein.

[0291] In other embodiments, the method of expanding and/or activating the cells further comprises addition of a second stimulatory molecule, e.g., CD28. For example, the CAR ligand and the second stimulatory molecule can be immobilized to a substrate, e.g., one or more beads, thereby providing increased cell expansion and/or activation.

[0292] In yet another aspect, a method for selecting or enriching for a CAR expressing cell is provided. The method includes contacting the CAR expressing cell with a CAR ligand as described herein; and selecting the cell on the basis of binding of the CAR ligand.

[0293] In yet other embodiments, a method for depleting, reducing and/or killing a CAR expressing cell is provided. The method includes contacting the CAR expressing cell with a CAR ligand as described herein; and targeting the cell on the basis of binding of the CAR ligand, thereby reducing the number, and/or killing, the CAR-expressing cell. In one embodiment, the CAR ligand is coupled to a toxic agent (e.g., a toxin or a cell ablative drug). In another embodiment, the anti-idiotypic antibody can cause effector cell activity, e.g., ADCC or ADC activities.

[0294] Exemplary anti-CAR antibodies that can be used in the methods disclosed herein are described, e.g., in WO 2014/190273 and by Jena et al., “Chimeric Antigen Receptor (CAR)-Specific Monoclonal Antibody to Detect CD19-Specific T cells in Clinical Trials”, PLOS March 2013 8:3 e57838, the contents of which are incorporated by reference.

[0295] In some aspects and embodiments, the compositions and methods herein are optimized for a specific subset of T cells, e.g., as described in US Serial No. PCT/US2015/043219 filed Jul. 31, 2015, the contents of which are incorporated herein by reference in their entirety. In some embodiments, the optimized subsets of T cells display an enhanced persistence compared to a control T cell, e.g., a T cell of a different type (e.g., CD8⁺ or CD4⁺) expressing the same construct.

[0296] In some embodiments, a CD4⁺ T cell comprises a CAR described herein, which CAR comprises an intracellular signaling domain suitable for (e.g., optimized for, e.g., leading to enhanced persistence in) a CD4⁺ T cell, e.g., an ICOS domain. In some embodiments, a CD8⁺ T cell comprises a CAR described herein, which CAR comprises an intracellular signaling domain suitable for (e.g., optimized for, e.g., leading to enhanced persistence of) a CD8⁺ T cell, e.g., a 4-1BB domain, a CD28 domain, or another costimulatory domain other than an ICOS domain. In some embodiments, the CAR described herein comprises an antigen binding domain described herein, e.g., a CAR comprising an antigen binding domain.

[0297] In an aspect, described herein is a method of treating a subject, e.g., a subject having cancer. The method includes administering to said subject, an effective amount of:

[0298] 1) a CD4⁺ T cell comprising a CAR (the CAR^{CD4+}) comprising:

[0299] an antigen binding domain, e.g., an antigen binding domain described herein;

[0300] a transmembrane domain; and

[0301] an intracellular signaling domain, e.g., a first costimulatory domain, e.g., an ICOS domain; and

[0302] 2) a CD8⁺ T cell comprising a CAR (the CAR^{CD8+}) comprising:

[0303] an antigen binding domain, e.g., an antigen binding domain described herein;

[0304] a transmembrane domain; and

[0305] an intracellular signaling domain, e.g., a second co stimulatory domain, e.g., a 4-1BB domain, a CD28 domain, or another costimulatory domain other than an ICOS domain;

[0306] wherein the CAR^{CD4+} and the CAR^{CD8+} differ from one another.

[0307] Optionally, the method further includes administering:

[0308] 3) a second CD8+ T cell comprising a CAR (the second CAR^{CD8+}) comprising:

[0309] an antigen binding domain, e.g., an antigen binding domain described herein;

[0310] a transmembrane domain; and

[0311] an intracellular signaling domain, wherein the second CAR^{CD8+} comprises an intracellular signaling domain, e.g., a costimulatory signaling domain, not present on the CAR^{CD8+}, and, optionally, does not comprise an ICOS signaling domain.

### RNA Transfection

[0312] Disclosed herein are methods for producing an in vitro transcribed RNA CAR. RNA CAR and methods of using the same are described, e.g., in paragraphs 553-570 of in International Application WO2015/142675, filed Mar. 13, 2015, which is herein incorporated by reference in its entirety.

[0313] In one embodiment, the in vitro transcribed RNA CAR can be introduced to a cell as a form of transient transfection. The RNA may have a 3′ UTR, a 5′ UTR, or both. The 5′ UTR may contain a Kozak sequence. The RNA may comprise an IRES. The RNA may comprise a 5′ cap. The RNA may comprise a polyA sequence. RNA can be produced using a DNA template that comprises a promoter, e.g., a T7, T7, or SP6 promoter. RNA can be introduced into target cells using any of a number of different methods, for instance, commercially available methods which include, but are not limited to, electroporation, the Gene Pulser II, Multiporator, cationic liposome mediated transfection using lipofection, polymer encapsulation, peptide mediated transfection, or biolistic particle delivery systems such as “gene guns”.

### Non-Viral Delivery Methods

[0314] In some aspects, non-viral methods can be used to deliver a nucleic acid encoding a CAR described herein into a cell or tissue or a subject. Suitable non-viral delivery methods include transposons (e.g., Sleeping Beauty, piggyBac, and pT2-based transposons). Exemplary non-viral delivery methods and methods of using the same are described, e.g., in paragraphs 571-579 of International Application WO2015/142675, filed Mar. 13, 2015, which is herein incorporated by reference in its entirety.

### Methods of Manufacture/Production

[0315] In one aspect, methods of manufacturing a CAR-expressing cell according to the invention are disclosed herein (e.g., in “Source of Cells” and “Activation and Expansion of Cells”).

[0316] In an embodiment, a method of manufacturing a CAR-expressing cell is provided. The method comprises:
[0317] providing a preparation of a CAR-expressing cell (e.g., a plurality of CAR-expressing immune effector cells, such as a T cells, or an NK cells) (e.g., a CD19 CAR-expressing cell as described herein, such as, e.g., CTL019);

[0318] acquiring a signature of a sample of a manufactured CAR-expressing cell composition (e.g., a CAR-expressing cell product), wherein the signature comprises the number, frequency, and/or percentage of one of the following cell populations in the sample, wherein each cell of the cell population expresses: IL2; IFNγ; IL17A; TNF; IL8; CD107a; IL2 and IFNγ; IL2 and IL17A; IL2 and TNF; IL2 and IL8; IL2 and CD107a; IFNγ and IL17A; IFNγ and TNF; IFN and IL8; IFNγ and CD107a; IL17A and TNF; IL17A and IL8; IL17A and CD107a; TNF and IL8; TNF and CD107a; IL8 and CD107a; IL2, IFNγ, and IL17A; IL2, IFNγ, and TNF; IL2, IFNγ, and IL8; IL2, IFNγ, and CD107a; IL2, IL17A, and TNF; IL2, IL17A, and IL8; IL2, IL17A, and CD107a; IL2, TNF, and IL8; IL2, TNF, and CD107a; IL2, IL8, and CD107a; IFNγ, IL17A, and TNF; IFNγ, IL17A, and IL8; IFNγ, IL17A, and CD107a; IFNγ, TNF, and IL8; IFNγ, TNF, and CD107a; IFNγ, IL8, and CD107a; IL17A, TNF, and IL8; IL17A, TNF, and CD107a; IL17A, IL8, and CD107a; TNF, IL8, and CD107a; IL2, IFNγ, IL17A, and TNF; IL2, IFNγ, IL17A, and IL8; IL2, IFNγ, IL17A, and CD107a; IL2, IFNγ, TNF, and IL8; IL2, IFNγ, TNF, and CD107a; IL2, IFNγ, IL8, and CD107a; IL2, IL17A, TNF, and IL8; IL2, IL17A, TNF, and CD107a; IL2, IL17A, IL8, and CD107a; IL2, TNF, IL8, and CD107a; IFNγ, IL17A, TNF, and IL8; IFNγ, IL17A, TNF, and CD107a; IFNγ, IL17A, IL8, and CD107a; IFNγ, TNF, IL8, and CD107a; IL17A, TNF, IL8, and CD107a; IL2, IFNγ, IL17A, TNF, and IL8; IL2, IFNγ, IL17A, TNF, and CD107a; IL2, IFNγ, IL17A, IL8, and CD107a; IL2, IFNγ, TNF, IL8, and CD107a; IL2, IFNγ, IL17A, TNF, IL8, and CD107a; IL2, IL17A, TNF, IL8, and CD107a; or IFNγ, IL17A, TNF, IL8, or CD107a; and

[0319] modifying a manufacturing process of a the CAR-expressing cell product, e.g., enriching for CAR-T cells with a preselected signature.

[0320] In an embodiment, provided methods comprise steps of providing a CAR-expressing cell (e.g., T cell, NK cell) preparation (e.g., a CD19 CAR-expressing cell (e.g., T cell, NK cell) as described herein, such as, e.g., CTL019);

[0321] acquiring a signature of a sample of a manufactured CAR-expressing cell composition (e.g., a CAR-expressing cell product), wherein the signature comprises the number, frequency, and/or percentage of one of the following cell populations in the sample, wherein each cell of the cell population expresses: IL2; IFNγ; IL17A; TNF; IL8; CD107a; IL2 and IFNγ; IL2 and IL17A; IL2 and TNF; IL2 and IL8; IL2 and CD107a; IFNγ and IL17A; IFNγ and TNF; IFN and IL8; IFNγ and CD107a; IL17A and TNF; IL17A and IL8; IL17A and CD107a; TNF and IL8; TNF and CD107a; IL8 and CD107a; IL2, IFNγ, and IL17A; IL2, IFNγ, and TNF; IL2, IFNγ, and IL8; IL2, IFNγ, and CD107a; IL2, IL17A, and TNF; IL2, IL17A, and IL8; IL2, IL17A, and CD107a; IL2, TNF, and IL8; IL2, TNF, and CD107a; IL2, IL8, and CD107a; IFNγ, IL17A, and TNF; IFNγ, IL17A, and IL8; IFNγ, IL17A, and CD107a; IFNγ, TNF, and IL8; IFNγ, TNF, and CD107a; IFNγ, IL8, and CD107a; IL17A, TNF, and IL8; IL17A, TNF, and CD107a; IL17A, IL8, and CD107a; TNF, IL8, and CD107a; IL2, IFNγ, IL17A, and TNF; IL2, IFNγ, IL17A, and IL8; IL2, IFNγ, IL17A, and CD107a; IL2, IFNγ, TNF, and IL8; IL2, IFNγ, TNF, and CD107a; IL2, IFNγ, IL8, and CD107a; IL2, IL17A, TNF, and IL8; IL2, IL17A, TNF, and CD107a; IL2, IL17A, IL8, and CD107a; IL2, TNF, IL8, and CD107a; IFNγ, IL17A, TNF, and IL8; IFNγ, IL17A, TNF, and CD107a; IFNγ, IL17A, IL8, and CD107a; IFNγ, TNF, IL8, and CD107a; IL17A, TNF, IL8, and CD107a; IL2, IFNγ, IL17A, TNF, and IL8; IL2, IFNγ, IL17A, TNF, and CD107a; IL2, IFNγ, IL17A, IL8, and CD107a; IL2, IFNγ, TNF, IL8, and CD107a; IL2, IFNγ, IL17A, TNF, IL8, and CD107a; IL2, IL17A, TNF, IL8, and CD107a; or IFNγ, IL17A, TNF, IL8, or CD107a; and

[0322] correlating the gene signature with the pharmacokinetics of the manufactured CAR-expressing cell composition (e.g., a CAR-expressing cell product); and

[0323] optimizing the manufactured CAR-expressing cell composition (e.g., a CAR-expressing cell product) based on the correlation prior to infusion into patients.

[0324] In an embodiment, provided methods comprise a step of providing a blood sample, e.g., a T cell sample, from a subject having cancer.

[0325] In an embodiment, provided methods further comprise a step of comparing the signature with that of a reference sample.

[0326] In an embodiment, a reference sample is a CAR-expressing cell (e.g., T cell, NK cell) preparation (e.g., a CD19 CAR-expressing cell as described herein, such as, e.g., CTL019) from a different batch of cells producing the therapeutic CAR-expressing cell preparation.

[0327] In an embodiment, a reference sample is a healthy donor sample with a manufactured CAR-expressing cell (e.g., T cell, NK cell) product (e.g., a CD19 CAR-expressing cell as described herein, such as, e.g., CTL019). In an embodiment, a reference sample is a healthy donor sample with a manufactured CD19 CAR-expressing cell product, such as, e.g., CTL019 product.

[0328] In an embodiment, provided methods further comprise a step of recording the result of the comparing in a quality control record for the therapeutic CAR-expressing cell (e.g., T cell, NK cell) preparation.

[0329] In an embodiment, the determined difference is compared with a historical record of the reference sample.

[0330] In an embodiment, the manufactured CAR-expressing cell composition (e.g., a CAR-expressing cell product) is a CD19 CAR-expressing cell (e.g., CTL019) composition.

[0331] In an embodiment, the manufactured CAR-expressing cell composition (e.g., a CAR-expressing cell product) comprises a CD19 CAR-expressing cell (e.g., CTL019) composition.

[0332] In an embodiment, the manufactured CAR-expressing cell composition (e.g., a CAR-expressing cell product) consists of a CD19 CAR-expressing cell (e.g., CTL019) composition.

[0333] In an aspect, a method is provided, comprising:

[0334] providing a blood sample, e.g., a T cell sample, from a subject having cancer;

[0335] acquiring a signature of a sample of a manufactured CAR-expressing cell composition (e.g., a CAR-expressing cell product), wherein the signature comprises the number, frequency, and/or percentage of one of the following cell populations in the sample, wherein each cell of the cell population expresses: IL2; IFNγ; IL17A; TNF; IL8; CD107a; IL2 and IFNγ; IL2 and IL17A; IL2 and TNF; IL2 and IL8; IL2 and CD107a; IFNγ and IL17A; IFNγ and TNF; IFN and IL8; IFNγ and CD107a; IL17A and TNF; IL17A and IL8; IL17A and CD107a; TNF and IL8; TNF and CD107a; IL8 and CD107a; IL2, IFNγ, and IL17A; IL2, IFNγ, and TNF; IL2, IFNγ, and IL8; IL2, IFNγ, and CD107a; IL2, IL17A, and TNF; IL2, IL17A, and IL8; IL2, IL17A, and CD107a; IL2, TNF, and IL8; IL2, TNF, and CD107a; IL2, IL8, and CD107a; IFNγ, IL17A, and TNF; IFNγ, IL17A, and IL8; IFNγ, IL17A, and CD107a; IFNγ, TNF, and IL8; IFNγ, TNF, and CD107a; IFNγ, IL8, and CD107a; IL17A, TNF, and IL8; IL17A, TNF, and CD107a; IL17A, IL8, and CD107a; TNF, IL8, and CD107a; IL2, IFNγ, IL17A, and TNF; IL2, IFNγ, IL17A, and IL8; IL2, IFNγ, IL17A, and CD107a; IL2, IFNγ, TNF, and IL8; IL2, IFNγ, TNF, and CD107a; IL2, IFNγ, IL8, and CD107a; IL2, IL17A, TNF, and IL8; IL2, IL17A, TNF, and CD107a; IL2, IL17A, IL8, and CD107a; IL2, TNF, IL8, and CD107a; IFNγ, IL17A, TNF, and IL8; IFNγ, IL17A, TNF, and CD107a; IFNγ, IL17A, IL8, and CD107a; IFNγ, TNF, IL8, and CD107a; IL17A, TNF, IL8, and CD107a; IL2, IFNγ, IL17A, TNF, and IL8; IL2, IFNγ, IL17A, TNF, and CD107a; IL2, IFNγ, IL17A, IL8, and CD107a; IL2, IFNγ, TNF, IL8, and CD107a; IL2, IFNγ, IL17A, TNF, IL8, and CD107a; IL2, IL17A, TNF, IL8, and CD107a; or IFNγ, IL17A, TNF, IL8, or CD107a; and

[0336] comparing the obtained signature to that of a reference value, e.g., a historical record signature;

[0337] determining a difference between the obtained and the reference value; and

[0338] recording the determined difference in a quality control record.

[0339] The method can comprise a step of comparing the obtained signature difference with that of a reference sample.

[0340] In some embodiments, the methods disclosed herein further include administering a T cell depleting agent after treatment with the cell (e.g., an immune effector cell as described herein), thereby reducing (e.g., depleting) the CAR-expressing cells (e.g., the CD19CAR-expressing cells). Such T cell depleting agents can be used to effectively deplete CAR-expressing cells (e.g., CD19CAR-expressing cells) to mitigate toxicity. In some embodiments, the CAR-expressing cells were manufactured according to a method herein, e.g., assayed (e.g., before or after transfection or transduction) according to a method herein.

[0341] In some embodiments, the T cell depleting agent is administered one, two, three, four, or five weeks after administration of the cell, e.g., the population of immune effector cells, described herein.

[0342] In one embodiment, the T cell depleting agent is an agent that depletes CAR-expressing cells, e.g., by inducing antibody dependent cell-mediated cytotoxicity (ADCC) and/or complement-induced cell death. For example, CAR-expressing cells described herein may also express an antigen (e.g., a target antigen) that is recognized by molecules capable of inducing cell death, e.g., ADCC or complement-induced cell death. For example, CAR expressing cells described herein may also express a target protein (e.g., a receptor) capable of being targeted by an antibody or antibody fragment. Examples of such target proteins include, but are not limited to, EpCAM, VEGFR, integrins (e.g., integrins αvβ3, α4, αI3/4β3, α4β7, α5β1, αvβ3, αv), members of the TNF receptor superfamily (e.g., TRAIL-R1 , TRAIL-R2), PDGF Receptor, interferon receptor, folate receptor, GPNMB, ICAM-1, HLA-DR, CEA, CA-125, MUC1, TAG-72, IL-6 receptor, 5T4, GD2, GD3, CD2, CD3, CD4, CD5, CD11 , CD11a/LFA-1, CD15, CD18/ITGB2, CD19, CD20, CD22, CD23/1gE Receptor, CD25, CD28, CD30, CD33, CD38, CD40, CD41, CD44, CD51, CD52, CD62L, CD74, CD80, CD125, CD147/basigin, CD152/CTLA-4, CD154/CD40L, CD195/CCR5, CD319/SLAMF7, and EGFR, and truncated versions thereof (e.g., versions preserving one or more extracellular epitopes but lacking one or more regions within the cytoplasmic domain).

[0343] In some embodiments, the CAR expressing cell co-expresses the CAR and the target protein, e.g., naturally expresses the target protein or is engineered to express the target protein. For example, the cell, e.g., the population of immune effector cells, can include a nucleic acid (e.g., vector) comprising the CAR nucleic acid (e.g., a CAR nucleic acid as described herein) and a nucleic acid encoding the target protein.

[0344] In one embodiment, the T cell depleting agent is a CD52 inhibitor, e.g., an anti-CD52 antibody molecule, e.g., alemtuzumab.

[0345] In other embodiments, the cell, e.g., the population of immune effector cells, expresses a CAR molecule as described herein (e.g., CD19CAR) and the target protein recognized by the T cell depleting agent. In one embodiment, the target protein is CD20. In embodiments where the target protein is CD20, the T cell depleting agent is an anti-CD20 antibody, e.g., rituximab.

[0346] In further embodiments of any of the aforesaid methods, the methods further include transplanting a cell, e.g., a hematopoietic stem cell, or a bone marrow, into the mammal.

[0347] In another aspect, the invention features a method of conditioning a mammal prior to cell transplantation. The method includes administering to the mammal an effective amount of the cell comprising a CAR nucleic acid or polypeptide, e.g., a CD19 CAR nucleic acid or polypeptide. In some embodiments, the cell transplantation is a stem cell transplantation, e.g., a hematopoietic stem cell transplantation, or a bone marrow transplantation. In other embodiments, conditioning a subject prior to cell transplantation includes reducing the number of target-expressing cells in a subject, e.g., CD19-expressing normal cells or CD19-expressing cancer cells.

### Nucleic Acid Constructs Encoding a CAR

[0348] Nucleic acid molecules encoding one or more CAR constructs can be introduced into an immune effector cell (e.g., a T cell) as described herein. In one aspect, the nucleic acid molecule is provided as a messenger RNA transcript. In one aspect, the nucleic acid molecule is provided as a DNA construct.

[0349] In some embodiments, a nucleic acid described herein is introduced into a cell that has been assayed by a method described herein. In some embodiments, a cell comprising a nucleic acid described herein is assayed by a method described herein.

[0350] The nucleic acid molecules described herein can be a DNA molecule, an RNA molecule, or a combination thereof. In one embodiment, the nucleic acid molecule is an mRNA encoding a CAR polypeptide as described herein. In other embodiments, the nucleic acid molecule is a vector that includes any of the aforesaid nucleic acid molecules.

[0351] Nucleic acid molecules can encode, e.g., a CAR molecule described herein, and can comprise, e.g., a nucleic acid sequence described herein, e.g., in Table 2, Table 3 or Table 4.

[0352] The nucleic acid sequences coding for the desired molecules can be obtained using recombinant methods known in the art, such as, for example by screening libraries from cells expressing the gene, by deriving the gene from a vector known to include the same, or by isolating directly from cells and tissues containing the same, using standard techniques. Alternatively, the gene of interest can be produced synthetically, rather than cloned.

[0353] Also described are vectors in which a nucleic acid of the present disclosure is inserted. Vectors derived from retroviruses such as the lentivirus are suitable tools to achieve long-term gene transfer since they allow long-term, stable integration of a transgene and its propagation in daughter cells. Lentiviral vectors have the added advantage over vectors derived from onco-retroviruses such as murine leukemia viruses in that they can transduce non-proliferating cells, such as hepatocytes. They also have the added advantage of low immunogenicity. A retroviral vector may also be, e.g., a gammaretroviral vector. A gammaretroviral vector may include, e.g., a promoter, a packaging signal (ψ), a primer binding site (PBS), one or more (e.g., two) long terminal repeats (LTR), and a transgene of interest, e.g., a gene encoding a CAR. A gammaretroviral vector may lack viral structural gens such as gag, pol, and env. Exemplary gammaretroviral vectors include Murine Leukemia Virus (MLV), Spleen-Focus Forming Virus (SFFV), and Myeloproliferative Sarcoma Virus (MPSV), and vectors derived therefrom. Other gammaretroviral vectors are described, e.g., in Tobias Maetzig et al., “Gammaretroviral Vectors: Biology, Technology and Application” Viruses. 2011 June; 3(6): 677-713.

[0354] In another embodiment, the vector comprising the nucleic acid encoding the desired CAR of the invention is an adenoviral vector (A5/35). In another embodiment, the expression of nucleic acids encoding CARs can be accomplished using of transposons such as sleeping beauty, CRISPR, CAS9, and zinc finger nucleases. See below June et al. 2009 NATURE REVIEWS IMMUNOLOGY 9.10: 704-716, is incorporated herein by reference.

[0355] In brief summary, the expression of natural or synthetic nucleic acids encoding CARs is typically achieved by operably linking a nucleic acid encoding the CAR polypeptide or portions thereof to a promoter, and incorporating the construct into an expression vector. The vectors can be suitable for replication and integration eukaryotes. Typical cloning vectors contain transcription and translation terminators, initiation sequences, and promoters useful for regulation of the expression of the desired nucleic acid sequence.

[0356] The expression constructs may also be used for nucleic acid immunization and gene therapy, using standard gene delivery protocols. Methods for gene delivery are known in the art. See, e.g., U.S. Pat. Nos. 5,399,346, 5,580,859, 5,589,466, incorporated by reference herein in their entireties. In another embodiment, the invention provides a gene therapy vector.

[0357] The nucleic acid can be cloned into a number of types of vectors. For example, the nucleic acid can be cloned into a vector including, but not limited to a plasmid, a phagemid, a phage derivative, an animal virus, and a cosmid. Vectors of particular interest include expression vectors, replication vectors, probe generation vectors, and sequencing vectors.

[0358] Further, the expression vector may be provided to a cell in the form of a viral vector. Viral vector technology is well known in the art and is described, for example, in Sambrook et al., 2012, MOLECULAR CLONING: A LABORATORY MANUAL, volumes 1-4, Cold Spring Harbor Press, NY), and in other virology and molecular biology manuals. Viruses, which are useful as vectors include, but are not limited to, retroviruses, adenoviruses, adeno-associated viruses, herpes viruses, and lentiviruses. In general, a suitable vector contains an origin of replication functional in at least one organism, a promoter sequence, convenient restriction endonuclease sites, and one or more selectable markers, (e.g., WO 01/96584; WO 01/29058; and U.S. Pat. No. 6,326,193).

[0359] A number of viral based systems have been developed for gene transfer into mammalian cells. For example, retroviruses provide a convenient platform for gene delivery systems. A selected gene can be inserted into a vector and packaged in retroviral particles using techniques known in the art. The recombinant virus can then be isolated and delivered to cells of the subject either in vivo or ex vivo. A number of retroviral systems are known in the art. In some embodiments, adenovirus vectors are used. A number of adenovirus vectors are known in the art. In one embodiment, lentivirus vectors are used.

[0360] Additional promoter elements, e.g., enhancers, regulate the frequency of transcriptional initiation. Typically, these are located in the region 30-110 bp upstream of the start site, although a number of promoters have been shown to contain functional elements downstream of the start site as well. The spacing between promoter elements frequently is flexible, so that promoter function is preserved when elements are inverted or moved relative to one another. In the thymidine kinase (tk) promoter, the spacing between promoter elements can be increased to 50 bp apart before activity begins to decline. Depending on the promoter, it appears that individual elements can function either cooperatively or independently to activate transcription. Exemplary promoters include the CMV IE gene, EF-1α, ubiquitin C, or phosphoglycerokinase (PGK) promoters.

[0361] An example of a promoter that is capable of expressing a CAR transgene in a mammalian T cell is the EF1a promoter. The native EF1a promoter drives expression of the alpha subunit of the elongation factor-1 complex, which is responsible for the enzymatic delivery of aminoacyl tRNAs to the ribosome. The EF1a promoter has been extensively used in mammalian expression plasmids and has been shown to be effective in driving CAR expression from transgenes cloned into a lentiviral vector. See, e.g., Milone et al., MOL. THER. 17(8): 1453-1464 (2009). In one aspect, the EF1a promoter comprises the sequence provided as SEQ ID NO:11.

[0362] Another example of a promoter is the immediate early cytomegalovirus (CMV) promoter sequence. This promoter sequence is a strong constitutive promoter sequence capable of driving high levels of expression of any polynucleotide sequence operatively linked thereto. However, other constitutive promoter sequences may also be used, including, but not limited to the simian virus 40 (SV40) early promoter, mouse mammary tumor virus (MMTV), human immunodeficiency virus (HIV) long terminal repeat (LTR) promoter, MoMuLV promoter, an avian leukemia virus promoter, an Epstein-Barr virus immediate early promoter, a Rous sarcoma virus promoter, as well as human gene promoters such as, but not limited to, the actin promoter, the myosin promoter, the elongation factor-1α promoter, the hemoglobin promoter, and the creatine kinase promoter. Further, the invention should not be limited to the use of constitutive promoters. Inducible promoters are also contemplated as part of the invention. The use of an inducible promoter provides a molecular switch capable of turning on expression of the polynucleotide sequence which it is operatively linked when such expression is desired, or turning off the expression when expression is not desired. Examples of inducible promoters include, but are not limited to a metallothionine promoter, a glucocorticoid promoter, a progesterone promoter, and a tetracycline promoter.

[0363] Another example of a promoter is the phosphoglycerate kinase (PGK) promoter. In embodiments, a truncated PGK promoter (e.g., a PGK promoter with one or more, e.g., 1, 2, 5, 10, 100, 200, 300, or 400, nucleotide deletions when compared to the wild-type PGK promoter sequence) may be desired.

[0364] A vector may also include, e.g., a signal sequence to facilitate secretion, a polyadenylation signal and transcription terminator (e.g., from Bovine Growth Hormone (BGH) gene), an element allowing episomal replication and replication in prokaryotes (e.g. SV40 origin and ColE1 or others known in the art) and/or elements to allow selection (e.g., ampicillin resistance gene and/or zeocin marker).

[0365] In order to assess the expression of a CAR polypeptide or portions thereof, the expression vector to be introduced into a cell can also contain either a selectable marker gene or a reporter gene or both to facilitate identification and selection of expressing cells from the population of cells sought to be transfected or infected through viral vectors. In other aspects, the selectable marker may be carried on a separate piece of DNA and used in a co-transfection procedure. Both selectable markers and reporter genes may be flanked with appropriate regulatory sequences to enable expression in the host cells. Useful selectable markers include, for example, antibiotic-resistance genes, such as neo and the like.

[0366] Reporter genes are used for identifying potentially transfected cells and for evaluating the functionality of regulatory sequences. Reporter genes are described, e.g., in paragraph 599 of International Application WO2015/142675, filed Mar. 13, 2015, which is herein incorporated by reference in its entirety.

[0367] In embodiments, the vector may comprise two or more nucleic acid sequences encoding a CAR, e.g., a CAR described herein, e.g., a CD19 CAR, and a second CAR, e.g., an inhibitory CAR or a CAR that specifically binds to an antigen other than CD19. In such embodiments, the two or more nucleic acid sequences encoding the CAR are encoded by a single nucleic molecule in the same frame and as a single polypeptide chain. In this aspect, the two or more CARs, can, e.g., be separated by one or more peptide cleavage sites. (e.g., an auto-cleavage site or a substrate for an intracellular protease). Examples of peptide cleavage sites include T2A, P2A, E2A, or F2A sites.

[0368] Methods of introducing and expressing genes into a cell are known in the art. In the context of an expression vector, the vector can be readily introduced into a host cell, e.g., mammalian, bacterial, yeast, or insect cell by any method in the art. For example, the expression vector can be transferred into a host cell by physical, chemical, or biological means, e.g., those described in paragraphs 601-603 of International Application WO2015/142675, filed Mar. 13, 2015, which is herein incorporated by reference in its entirety.

[0369] In the case where a non-viral delivery system is utilized, an exemplary delivery vehicle is a liposome. The use of lipid formulations is contemplated for the introduction of the nucleic acids into a host cell (in vitro, ex vivo or in vivo), and is described, e.g., in paragraphs 604-605 of International Application WO2015/142675, filed Mar. 13, 2015, which is herein incorporated by reference in its entirety.

[0370] Regardless of the method used to introduce exogenous nucleic acids into a host cell or otherwise expose a cell to the inhibitor of the present invention, in order to confirm the presence of the recombinant DNA sequence in the host cell, a variety of assays may be performed. Such assays include, for example, “molecular biological” assays well known to those of skill in the art, such as Southern and Northern blotting, RT-PCR and PCR; “biochemical” assays, such as detecting the presence or absence of a particular peptide, e.g., by immunological means (ELISAs and Western blots) or by assays described herein to identify agents falling within the scope of the invention.

### Exemplary CAR Molecules

[0371] The CAR molecules disclosed herein can comprise a binding domain that binds to a target, e.g., a target as described herein; a transmembrane domain, e.g., a transmembrane domain as described herein; and an intracellular signaling domain, e.g., an intracellular domain as described herein. In embodiments, the binding domain comprises a heavy chain complementary determining region 1 (HC CDR1), a heavy chain complementary determining region 2 (HC CDR2), and a heavy chain complementary determining region 3 (HC CDR3) of a heavy chain binding domain described herein, and/or a light chain complementary determining region 1 (LC CDR1), a light chain complementary determining region 2 (LC CDR2), and a light chain complementary determining region 3 (LC CDR3) of a light chain binding domain described herein.

[0372] In other embodiments, the CAR molecule comprises a CD19 CAR molecule described herein, e.g., a CD19 CAR molecule described in US-2015-0283178-A1, e.g., CTL019. In embodiments, the CD19 CAR comprises an amino acid, or has a nucleotide sequence shown in US-2015-0283178-A1, incorporated herein by reference, or a sequence substantially identical thereto (e.g., at least 85%, 90%, 95% or more identical thereto).

[0373] In one embodiment, the CAR T cell that specifically binds to CD19 has the USAN designation TISAGENLECLEUCEL-T. CTL019 is made by a gene modification of T cells is mediated by stable insertion via transduction with a self-inactivating, replication deficient Lentiviral (LV) vector containing the CTL019 transgene under the control of the EF-1 alpha promoter. CTL019 can be a mixture of transgene positive and negative T cells that are delivered to the subject on the basis of percent transgene positive T cells.

[0374] In other embodiments, the CD19 CAR includes a CAR molecule, or an antigen binding domain (e.g., a humanized antigen binding domain) according to Table 3 of WO2014/153270, incorporated herein by reference. The amino acid and nucleotide sequences encoding the CD19 CAR molecules and antigen binding domains (e.g., including one, two, three VH CDRs; and one, two, three VL CDRs according to Kabat or Chothia), are specified in WO2014/153270. In embodiments, the CD19 CAR comprises an amino acid, or has a nucleotide sequence shown in WO2014/153270 incorporated herein by reference, or a sequence substantially identical to any of the aforesaid sequences (e.g., at least 85%, 90%, 95% or more identical to any of the aforesaid CD19 CAR sequences).

[0375] In one embodiment, the parental murine scFv sequence is the CAR19 construct provided in PCT publication WO2012/079000 (incorporated herein by reference) and provided herein in Table 2. In one embodiment, the anti-CD19 binding domain is a scFv described in WO2012/079000 and provided herein in Table 2.

[0376] In one embodiment, the CD19 CAR comprises an amino acid sequence provided as SEQ ID NO: 12 in PCT publication WO2012/079000. In embodiment, the amino acid sequence is:

[0377] MALPVTALLLPLALLLHAARPdiqmtqttsslsaslgdrvtiscrasqdiskylnwyqqkpdgtvklliyhtsr lhsgvpsrfsgsgsgtdysltisnleqediatyfcqqgntlpytfgggtkleitggggsggggsggggsevklqesgpglvapsqslsvtct vsgvslpdygvswirqpprkglewlgviwgsettyynsalksrltiikdnsksqvflkmnslqtddtaiyycakhyyyggsyamdyw gqgtsvtvsstttpaprpptpaptiasqplslrpeacrpaaggavhtrgldfacdiyiwaplagtcgvlllslvitlyckrgrkkllyifkqpf mrpvqttqeedgcscrfpeeeeggcelrvkfsrsadapaykqgqnqlynelnlgrreeydvldkrrgrdpemggkprrknpqeglyn elqkdkmaeayseigmkgerrrgkghdglyqglstatkdtydalhmqalppr (SEQ ID NO: 39), or a sequence substantially identical thereto (e.g., at least 85%, 90% or 95% or higher identical thereto), with or without the signal peptide sequence indicated in capital letters.

[0378] In embodiment, the amino acid sequence is:

[0379] diqmtqttsslsaslgdrvtiscrasqdiskylnwyqqkpdgtvklliyhtsrlhsgvpsrfsgsgsgtdysltisnleqediatyf cqqgntlpytfgggtkleitggggsggggsggggsevklqesgpglvapsqslsvtctvsgvslpdygvswirqpprkglewlgviwg settyynsalksrltiikdnsksqvflkmnslqtddtaiyycakhyyyggsyamdywgqgtsvtvsstttpaprpptpaptiasqplslrp eacrpaaggavhtrgldfacdiyiwaplagtcgvlllslvitlyckrgrkkllyifkqpfmrpvqttqeedgcscrfpeeeeggcelrvkfs rsadapaykqgqnqlynelnlgrreeydvldkrrgrdpemggkprrknpqeglynelqkdkmaeayseigmkgerrrgkghdgly qglstatkdtydalhmqalppr (SEQ ID NO: 40), or a sequence substantially homologous thereto (e.g., at least 85%, 90% or 95% or higher identical thereto).

[0380] In embodiments, the CAR molecule is a CD19 CAR molecule described herein, e.g., a humanized CAR molecule described herein, e.g., a humanized CD19 CAR molecule of Table 2 or having CDRs as set out in Tables 3 and 4.

[0381] In embodiments, the CAR molecule is a CD19 CAR molecule described herein, e.g., a murine CAR molecule described herein, e.g., a murine CD19 CAR molecule of Table 2 or having CDRs as set out in Tables 3 and 4.

[0382] In some embodiments, the CAR molecule comprises one, two, and/or three CDRs from the heavy chain variable region and/or one, two, and/or three CDRs from the light chain variable region of the murine or humanized CD19 CAR of Tables 3 and 4.

[0383] In one embodiment, the antigen binding domain comprises one, two three (e.g., all three) heavy chain CDRs, HC CDR1, HC CDR2 and HC CDR3, from an antibody listed herein, and/or one, two, three (e.g., all three) light chain CDRs, LC CDR1, LC CDR2 and LC CDR3, from an antibody listed herein. In one embodiment, the antigen binding domain comprises a heavy chain variable region and/or a variable light chain region of an antibody listed or described herein.

[0384] Exemplary CD19 CARs include any of the CD19 CARs or anti-CD19 binding domains described herein, e.g., in one or more tables (e.g., Table 2) described herein (e.g., or an anti-CD19 CAR described in Xu et al. Blood 123.24(2014):3750-9; Kochenderfer et al. Blood 122.25(2013):4129-39, Cruz et al. Blood 122.17(2013):2965-73, NCT00586391, NCT01087294, NCT02456350, NCT00840853, NCT02659943, NCT02650999, NCT02640209, NCT01747486, NCT02546739, NCT02656147, NCT02772198, NCT00709033, NCT02081937, NCT00924326, NCT02735083, NCT02794246, NCT02746952, NCT01593696, NCT02134262, NCT01853631, NCT02443831, NCT02277522, NCT02348216, NCT02614066, NCT02030834, NCT02624258, NCT02625480, NCT02030847, NCT02644655, NCT02349698, NCT02813837, NCT02050347, NCT01683279, NCT02529813, NCT02537977, NCT02799550, NCT02672501, NCT02819583, NCT02028455, NCT01840566, NCT01318317, NCT01864889, NCT02706405, NCT01475058, NCT01430390, NCT02146924, NCT02051257, NCT02431988, NCT01815749, NCT02153580, NCT01865617, NCT02208362, NCT02685670, NCT02535364, NCT02631044, NCT02728882, NCT02735291, NCT01860937, NCT02822326, NCT02737085, NCT02465983, NCT02132624, NCT02782351, NCT01493453, NCT02652910, NCT02247609, NCT01029366, NCT01626495, NCT02721407, NCT01044069, NCT00422383, NCT01680991, NCT02794961, or NCT02456207, each of which is incorporated herein by reference in its entirety.

[0385] Exemplary CD19 CAR and antigen binding domain constructs that can be used in the methods described herein are shown in Table 2. The light and heavy chain CDR sequences according to Kabat are shown by the bold and underlined text, and are also summarized in Tables 2 and 3-4 below. The location of the signal sequence and histidine tag are also underlined. In embodiments, the CD19 CAR sequences and antigen binding fragments thereof do not include the signal sequence and/or histidine tag sequences.

[0386] In embodiments, the CD19 CAR comprises an anti-CD19 binding domain (e.g., murine or humanized anti-CD19 binding domain), a transmembrane domain, and an intracellular signaling domain, and wherein said anti-CD19 binding domain comprises a heavy chain complementary determining region 1 (HC CDR1), a heavy chain complementary determining region 2 (HC CDR2), and a heavy chain complementary determining region 3 (HC CDR3) of any anti-CD19 heavy chain binding domain amino acid sequences listed in Table 3 and 4A-4B, or a sequence at least 85%, 90%, 95% or more identical thereto (e.g., having less than 5, 4, 3, 2 or 1 amino acid substitutions, e.g., conservative substitutions).

[0387] In one embodiment, the anti-CD19 binding domain comprises a light chain variable region described herein (e.g., in Table 3) and/or a heavy chain variable region described herein (e.g., in Table 3), or a sequence at least 85%, 90%, 95% or more identical thereto.

[0388] In one embodiment, the encoded anti-CD19 binding domain is a scFv comprising a light chain and a heavy chain of an amino acid sequence of Tables 3, or a sequence at least 85%, 90%, 95% or more identical thereto.

[0389] In an embodiment, the human or humanized anti-CD19 binding domain (e.g., an scFv) comprises: a light chain variable region comprising an amino acid sequence having at least one, two or three modifications (e.g., substitutions, e.g., conservative substitutions) but not more than 30, 20 or 10 modifications (e.g., substitutions, e.g., conservative substitutions) of an amino acid sequence of a light chain variable region provided in Table 2, or a sequence at least 85%, 90%, 95% or more identical thereto; and/or a heavy chain variable region comprising an amino acid sequence having at least one, two or three modifications (e.g., substitutions, e.g., conservative substitutions) but not more than 30, 20 or 10 modifications (e.g., substitutions, e.g., conservative substitutions) of an amino acid sequence of a heavy chain variable region provided in Table 2, or a sequence at least 85%, 90%, 95% or more identical thereto.

TABLE 2
CD19 CAR Constructs

| | | |
|---|---|---|
| | SEQ ID | |
| Name | NO: | Sequence |

CAR 1

| | | |
|---|---|---|
| CAR1 scFv | 41 | EIVMTQSPATLSLSPGERATLSCRASQDISKYLNWYQQKPGQAPRLLIYH |
| domain | | TSRLHSGIPARFSGSGSGTDYTLTISSLQPEDFAVYFCQQGNTLPYTFGQ |
| | | GTKLEIKGGGGSGGGGSGGGGSQVQLQESGPGLVKPSETLSLTCTVSGVS |
| | | LPDYGVSWIRQPPGKGLEWIGVIWGSETTYYSSSLKSRVTISKDNSKNQV |
| | | SLKLSSVTAADTAVYYCAKHYYYGGSYAMDYWGQGTLVTVSS |
| 103101 | 42 | atggccctccctgtcaccgccctgctgcttccgctggctcttctgctccacgccg |
| CAR1 | | ctcggcccgaaattgtgatgacccagtcacccgccactcttagcctttcacccgg |
| Soluble | | tgagcgcgcaaccctgtcttgcagagcctcccaagacatctcaaaataccttaat |
| scFv-nt | | tggtatcaacagaagcccggacaggctcctcgccttctgatctaccacaccagcc |
| | | ggctccattctggaatccctgccaggttcagcggtagcggatctgggaccgacta |
| | | caccctcactatcagctcactgcagccagaggacttcgctgtctatttctgtcag |
| | | caagggaacaccctgccctacacctttggacagggcaccaagctcgagattaaag |
| | | gtggaggtggcagcggaggaggtgggtccggcggtggaggaagccaggtccaact |
| | | ccaagaaagcggaccgggtcttgtgaagccatcagaaactctttcactgacttgt |
| | | actgtgagcggagtgtctctccccgattacggggtgtcttggatcagacagccac |
| | | cggggaagggtctggaatggattggagtgatttggggctctgagactacttacta |
| | | ctcttcatccctcaagtcacgcgtcaccatctcaaaggacaactctaagaatcag |
| | | gtgtcactgaaactgtcatctgtgaccgcagccgacaccgccgtgtactattgcg |
| | | ctaagcattactattatggcgggagctacgcaatggattactggggacagggtac |
| | | tctggtcaccgtgtccagccaccaccatcatcaccatcaccat |
| 103101 | 43 | MALPVTALLLPLALLLHAARPeivmtqspatlslspgeratlscrasqdiskyln |
| CAR1 | | wyqqkpgqaprlliyhtsrlhsgiparfsgsgsgtdytltisslqpedfavyfcq |
| Soluble | | qgntlpytfgqgtkleikggggsggggsggggsqvqlqesgpglvkpsetlsltc |
| scFv-aa | | tvsgvslpdygvswirqppgkglewigviwgsettyyssslksrvtiskdnsknq |
| | | vslklssvtaadtavyycakhyyyggsyamdywgqgtlvtvsshhhhhhhh |
| 104875 | 44 | atggccctccctgtcaccgccctgctgcttccgctggctcttctgctccacgccg |
| CAR 1- | | ctcggcccgaaattgtgatgacccagtcacccgccactcttagcctttcacccgg |
| Full-nt | | tgagcgcgcaaccctgtcttgcagagcctcccaagacatctcaaaataccttaat |
| | | tggtatcaacagaagcccggacaggctcctcgccttctgatctaccacaccagcc |
| | | ggctccattctggaatccctgccaggttcagcggtagcggatctgggaccgacta |
| | | caccctcactatcagctcactgcagccagaggacttcgctgtctatttctgtcag |
| | | caagggaacaccctgccctacacctttggacagggcaccaagctcgagattaaag |
| | | gtggaggtggcagcggaggaggtgggtccggcggtggaggaagccaggtccaact |
| | | ccaagaaagcggaccgggtcttgtgaagccatcagaaactctttcactgacttgt |
| | | actgtgagcggagtgtctctccccgattacggggtgtcttggatcagacagccac |
| | | cggggaagggtctggaatggattggagtgatttggggctctgagactacttacta |
| | | ctcttcatccctcaagtcacgcgtcaccatctcaaaggacaactctaagaatcag |
| | | gtgtcactgaaactgtcatctgtgaccgcagccgacaccgccgtgtactattgcg |
| | | ctaagcattactattatggcgggagctacgcaatggattactggggacagggtac |
| | | tctggtcaccgtgtccagcaccactaccccagcaccgaggccacccaccccggct |
| | | cctaccatcgcctcccagcctctgtccctgcgtccggaggcatgtagacccgcag |
| | | ctggtggggccgtgcatacccggggtcttgacttcgcctgcgatatctacatttg |
| | | ggcccctctggctggtacttgcggggtcctgctgctttcactcgtgatcactctt |
| | | tactgtaagcgcggtcggaagaagctgctgtacatctttaagcaacccttcatga |
| | | ggcctgtgcagactactcaagaggaggacggctgttcatgccggttcccagagga |
| | | ggaggaaggcggctgcgaactgcgcgtgaaattcagccgcagcgcagatgctcca |
| | | gcctacaagcaggggcagaaccagctctacaacgaactcaatcttggtcggagag |
| | | aggagtacgacgtgctggacaagcggagaggacgggacccagaaatgggcgggaa |
| | | gccgcgcagaaagaatccccaagagggcctgtacaacgagctccaaaaggataag |
| | | atggcagaagcctatagcgagattggtatgaaaggggaacgcagaagaggcaaag |
| | | gccacgacggactgtaccagggactcagcaccgccaccaaggacacctatgacgc |
| | | tcttcacatgcaggccctgccgcctcgg |
| 104875 | 45 | MALPVTALLLPLALLLHAARPeivmtqspatlslspgeratlscrasqdiskyln |
| CAR 1- | | wyqqkpgqaprlliyhtsrlhsgiparfsgsgsgtdytltisslqpedfavyfcq |
| Full-aa | | qgntlpytfgqgtkleikggggsggggsggggsqvqlqesgpglvkpsetlsltc |
| | | tvsgvslpdygvswirqppgkglewigviwgsettyyssslksrvtiskdnsknq |
| | | vslklssvtaadtavyycakhyyyggsyamdywgqgtlvtvsstttpaprpptpa |
| | | ptiasqplslrpeacrpaaggavhtrgldfacdiyiwaplagtcgvlllslvitl |
| | | yckrgrkkllyifkqpfmrpvqttqeedgcscrfpeeeeggcelrvkfsrsadap |
| | | aykqgqnqlynelnlgrreeydvldkrrgrdpemggkprrknpqeglynelqkdk |
| | | [sequence omitted] |

CAR 2

| | | |
|---|---|---|
| CAR2 scFv | 46 | eivmtqspatlslspgeratlscrasqdiskylnwyqqkpgqaprlliyhtsrlh |
| domain | | sgiparfsgsgsgtdytltisslqpedfavyfcqqgntlpytfgqgtkleikggg |
| | | gsggggsggggsqvqlqesgpglvkpsetlsltctvsgvslpdygvswirqppgk |
| | | glewigviwgsettyyqsslksrvtiskdnsknqvslklssvtaadtavyycakh |
| | | yyyggsyamdywgqgtlvtvss |
| 103102 | 47 | atggccctccctgtcaccgccctgctgcttccgctggctcttctgctccacgccg |
| CAR2- | | ctcggcccgaaattgtgatgacccagtcacccgccactcttagcctttcacccgg |
| Soluble | | tgagcgcgcaaccctgtcttgcagagcctcccaagacatctcaaaataccttaat |
| scFv-nt | | tggtatcaacagaagcccggacaggctcctcgccttctgatctaccacaccagcc |
| | | ggctccattctggaatccctgccaggttcagcggtagcggatctgggaccgacta |
| | | caccctcactatcagctcactgcagccagaggacttcgctgtctatttctgtcag |
| | | caagggaacaccctgccctacacctttggacagggcaccaagctcgagattaaag |
| | | gtggaggtggcagcggaggaggtgggtccggcggtggaggaagccaggtccaact |
| | | ccaagaaagcggaccgggtcttgtgaagccatcagaaactctttcactgacttgt |
| | | actgtgagcggagtgtctctccccgattacggggtgtcttggatcagacagccac |
| | | cggggaagggtctggaatggattggagtgatttggggctctgagactacttacta |
| | | ccaatcatccctcaagtcacgcgtcaccatctcaaaggacaactctaagaatcag |
| | | gtgtcactgaaactgtcatctgtgaccgcagccgacaccgccgtgtactattgcg |
| | | ctaagcattactattatggcgggagctacgcaatggattactggggacagggtac |
| | | tctggtcaccgtgtccagccaccaccatcatcaccatcaccat |
| 103102 | 48 | MALPVTALLLPLALLLHAARPeivmtqspatlslspgeratlscrasqdiskyln |
| CAR2- | | wyqqkpgqaprlliyhtsrlhsgiparfsgsgsgtdytltisslqpedfavyfcq |
| Soluble | | qgntlpytfgqgtkleikggggsggggsggggsqvqlqesgpglvkpsetlsltc |
| scFv-aa | | tvsgvslpdygvswirqppgkglewigviwgsettyyqsslksrvtiskdnsknq |
| | | vslklssvtaadtavyycakhyyyggsyamdywgqgtlvtvsshhhhhhhh |
| 104876 | 49 | atggccctccctgtcaccgccctgctgcttccgctggctcttctgctccacgccg |
| CAR 2- | | ctcggcccgaaattgtgatgacccagtcacccgccactcttagcctttcacccgg |
| Full-nt | | tgagcgcgcaaccctgtcttgcagagcctcccaagacatctcaaaataccttaat |
| | | tggtatcaacagaagcccggacaggctcctcgccttctgatctaccacaccagcc |
| | | ggctccattctggaatccctgccaggttcagcggtagcggatctgggaccgacta |
| | | caccctcactatcagctcactgcagccagaggacttcgctgtctatttctgtcag |
| | | caagggaacaccctgccctacacctttggacagggcaccaagctcgagattaaag |
| | | gtggaggtggcagcggaggaggtgggtccggcggtggaggaagccaggtccaact |
| | | ccaagaaagcggaccgggtcttgtgaagccatcagaaactctttcactgacttgt |
| | | actgtgagcggagtgtctctccccgattacggggtgtcttggatcagacagccac |
| | | cggggaagggtctggaatggattggagtgatttggggctctgagactacttacta |
| | | ccaatcatccctcaagtcacgcgtcaccatctcaaaggacaactctaagaatcag |
| | | gtgtcactgaaactgtcatctgtgaccgcagccgacaccgccgtgtactattgcg |
| | | ctaagcattactattatggcgggagctacgcaatggattactggggacagggtac |
| | | tctggtcaccgtgtccagcaccactaccccagcaccgaggccacccaccccggct |
| | | cctaccatcgcctcccagcctctgtccctgcgtccggaggcatgtagacccgcag |
| | | ctggtggggccgtgcatacccggggtcttgacttcgcctgcgatatctacatttg |
| | | ggcccctctggctggtacttgcggggtcctgctgctttcactcgtgatcactctt |
| | | tactgtaagcgcggtcggaagaagctgctgtacatctttaagcaacccttcatga |
| | | ggcctgtgcagactactcaagaggaggacggctgttcatgccggttcccagagga |
| | | ggaggaaggcggctgcgaactgcgcgtgaaattcagccgcagcgcagatgctcca |
| | | gcctacaagcaggggcagaaccagctctacaacgaactcaatcttggtcggagag |
| | | aggagtacgacgtgctggacaagcggagaggacgggacccagaaatgggcgggaa |
| | | gccgcgcagaaagaatccccaagagggcctgtacaacgagctccaaaaggataag |
| | | atggcagaagcctatagcgagattggtatgaaaggggaacgcagaagaggcaaag |
| | | gccacgacggactgtaccagggactcagcaccgccaccaaggacacctatgacgc |
| | | tcttcacatgcaggccctgccgcctcgg |
| 104876 | 50 | MALPVTALLLPLALLLHAARPeivmtqspatlslspgeratlscrasqdiskyln |
| CAR 2- | | wyqqkpgqaprlliyhtsrlhsgiparfsgsgsgtdytltisslqpedfavyfcq |
| Full-aa | | qgntlpytfgqgtkleikggggsggggsggggsqvqlqesgpglvkpsetlsltc |
| | | tvsgvslpdygvswirqppgkglewigviwgsettyyqsslksrvtiskdnsknq |
| | | vslklssvtaadtavyycakhyyyggsyamdywgqgtlvtvsstttpaprpptpa |
| | | ptiasqplslrpeacrpaaggavhtrgldfacdiyiwaplagtcgvlllslvitl |
| | | yckrgrkkllyifkqpfmrpvqttqeedgcscrfpeeeeggcelrvkfsrsadap |
| | | aykqgqnqlynelnlgrreeydvldkrrgrdpemggkprrknpqeglynelqkdk |
| | | [sequence omitted] |

CAR 3

| | | |
|---|---|---|
| CAR3 scFv | 51 | qvqlqesgpglvkpsetlsltctvsgvslpdygvswirqppgkglewigviwgse |
| domain | | ttyyssslksrvtiskdnsknqvslklssvtaadtavyycakhyyyggsyamdyw |
| | | gqgtlvtvssggggsggggsggggseivmtqspatlslspgeratlscrasqdis |
| | | kylnwyqqkpgqaprlliyhtsrlhsgiparfsgsgsgtdytltisslqpedfav |
| | | yfcqqgntlpytfgqgtkleik |
| 103104 | 52 | atggctctgcccgtgaccgcactcctcctgccactggctctgctgcttcacgccg |
| CAR 3- | | ctcgcccacaagtccagcttcaagaatcagggcctggtctggtgaagccatctga |
| Soluble | | gactctgtccctcacttgcaccgtgagcggagtgtccctcccagactacggagtg |
| scFv-nt | | agctggattagacagcctcccggaaagggactggagtggatcggagtgatttggg |
| | | gtagcgaaaccacttactattcatcttccctgaagtcacgggtcaccatttcaaa |
| | | ggataactcaaagaatcaagtgagcctcaagctctcatcagtcaccgccgctgac |
| | | accgccgtgtattactgtgccaagcattactactatggagggtcctacgccatgg |
| | | actactggggccagggaactctggtcactgtgtcatctggtggaggaggtagcgg |
| | | aggaggcgggagcggtggaggtggctccgaaatcgtgatgacccagagccctgca |
| | | accctgtccctttctcccggggaacgggctaccctttcttgtcgggcatcacaag |
| | | atatctcaaaatacctcaattggtatcaacagaagccgggacaggcccctaggct |
| | | tcttatctaccacacctctcgcctgcatagcgggattcccgcacgctttagcggg |
| | | tctggaagcgggaccgactacactctgaccatctcatctctccagcccgaggact |
| | | tcgccgtctacttctgccagcagggtaacaccctgccgtacaccttcggccaggg |
| | | caccaagcttgagatcaaacatcaccaccatcatcaccatcac |
| 103104 | 53 | MALPVTALLLPLALLLHAARPqvqlqesgpglvkpsetlsltctvsgvslpdygv |
| CAR 3- | | swirqppgkglewigviwgsettyyssslksrvtiskdnsknqvslklssvtaad |
| Soluble | | tavyycakhyyyggsyamdywgqgtlvtvssggggsggggsggggseivmtqspa |
| scFv-aa | | tlslspgeratlscrasqdiskylnwyqqkpgqaprlliyhtsrlhsgiparfsg |
| | | sgsgtdytltisslqpedfavyfcqqgntlpytfgqgtkleikhhhhhhhh |
| 104877 | 54 | atggctctgcccgtgaccgcactcctcctgccactggctctgctgcttcacgccg |
| CAR 3- | | ctcgcccacaagtccagcttcaagaatcagggcctggtctggtgaagccatctga |
| Full-nt | | gactctgtccctcacttgcaccgtgagcggagtgtccctcccagactacggagtg |
| | | agctggattagacagcctcccggaaagggactggagtggatcggagtgatttggg |
| | | gtagcgaaaccacttactattcatcttccctgaagtcacgggtcaccatttcaaa |
| | | ggataactcaaagaatcaagtgagcctcaagctctcatcagtcaccgccgctgac |
| | | accgccgtgtattactgtgccaagcattactactatggagggtcctacgccatgg |
| | | actactggggccagggaactctggtcactgtgtcatctggtggaggaggtagcgg |
| | | aggaggcgggagcggtggaggtggctccgaaatcgtgatgacccagagccctgca |
| | | accctgtccctttctcccggggaacgggctaccctttcttgtcgggcatcacaag |
| | | atatctcaaaatacctcaattggtatcaacagaagccgggacaggcccctaggct |
| | | tcttatctaccacacctctcgcctgcatagcgggattcccgcacgctttagcggg |
| | | tctggaagcgggaccgactacactctgaccatctcatctctccagcccgaggact |
| | | tcgccgtctacttctgccagcagggtaacaccctgccgtacaccttcggccaggg |
| | | caccaagcttgagatcaaaaccactactcccgctccaaggccacccacccctgcc |
| | | ccgaccatcgcctctcagccgctttccctgcgtccggaggcatgtagacccgcag |
| | | ctggtggggccgtgcatacccggggtcttgacttcgcctgcgatatctacatttg |
| | | ggcccctctggctggtacttgcggggtcctgctgctttcactcgtgatcactctt |
| | | tactgtaagcgcggtcggaagaagctgctgtacatctttaagcaacccttcatga |
| | | ggcctgtgcagactactcaagaggaggacggctgttcatgccggttcccagagga |
| | | ggaggaaggcggctgcgaactgcgcgtgaaattcagccgcagcgcagatgctcca |
| | | gcctacaagcaggggcagaaccagctctacaacgaactcaatcttggtcggagag |
| | | aggagtacgacgtgctggacaagcggagaggacgggacccagaaatgggcgggaa |
| | | gccgcgcagaaagaatccccaagagggcctgtacaacgagctccaaaaggataag |
| | | atggcagaagcctatagcgagattggtatgaaaggggaacgcagaagaggcaaag |
| | | gccacgacggactgtaccagggactcagcaccgccaccaaggacacctatgacgc |
| | | tcttcacatgcaggccctgccgcctcgg |
| 104877 | 55 | MALPVTALLLPLALLLHAARPqvqlqesgpglvkpsetlsltctvsgvslpdygv |
| CAR 3- | | swirqppgkglewigviwgsettyyssslksrvtiskdnsknqvslklssvtaad |
| Full-aa | | tavyycakhyyyggsyamdywgqgtlvtvssggggsggggsggggseivmtqspa |
| | | tlslspgeratlscrasqdiskylnwyqqkpgqaprlliyhtsrlhsgiparfsg |
| | | sgsgtdytltisslqpedfavyfcqqgntlpytfgqgtkleiktttpaprpptpa |
| | | ptiasqplslrpeacrpaaggavhtrgldfacdiyiwaplagtcgvlllslvitl |
| | | yckrgrkkllyifkqpfmrpvqttqeedgcscrfpeeeeggcelrvkfsrsadap |
| | | aykqgqnqlynelnlgrreeydvldkrrgrdpemggkprrknpqeglynelqkdk |
| | | [sequence omitted] |

CAR 4

| | | |
|---|---|---|
| CAR4 scFv | 56 | qvqlqesgpglvkpsetlsltctvsgvslpdygvswirqppgkglewigviwgse |
| domain | | ttyyqsslksrvtiskdnsknqvslklssvtaadtavyycakhyyyggsyamdyw |
| | | gqgtlvtvssggggsggggsggggseivmtqspatlslspgeratlscrasqdis |
| | | kylnwyqqkpgqaprlliyhtsrlhsgiparfsgsgsgtdytltisslqpedfav |
| | | yfcqqgntlpytfgqgtkleik |
| 103106 | 57 | atggctctgcccgtgaccgcactcctcctgccactggctctgctgcttcacgccg |
| CAR4- | | ctcgcccacaagtccagcttcaagaatcagggcctggtctggtgaagccatctga |
| Soluble | | gactctgtccctcacttgcaccgtgagcggagtgtccctcccagactacggagtg |
| scFv-nt | | agctggattagacagcctcccggaaagggactggagtggatcggagtgatttggg |
| | | gtagcgaaaccacttactatcaatcttccctgaagtcacgggtcaccatttcaaa |
| | | ggataactcaaagaatcaagtgagcctcaagctctcatcagtcaccgccgctgac |
| | | accgccgtgtattactgtgccaagcattactactatggagggtcctacgccatgg |
| | | actactggggccagggaactctggtcactgtgtcatctggtggaggaggtagcgg |
| | | aggaggcgggagcggtggaggtggctccgaaatcgtgatgacccagagccctgca |
| | | accctgtccctttctcccggggaacgggctaccctttcttgtcgggcatcacaag |
| | | atatctcaaaatacctcaattggtatcaacagaagccgggacaggcccctaggct |
| | | tcttatctaccacacctctcgcctgcatagcgggattcccgcacgctttagcggg |
| | | tctggaagcgggaccgactacactctgaccatctcatctctccagcccgaggact |
| | | tcgccgtctacttctgccagcagggtaacaccctgccgtacaccttcggccaggg |
| | | caccaagcttgagatcaaacatcaccaccatcatcaccatcac |
| 103106 | 58 | MALPVTALLLPLALLLHAARPqvqlqesgpglvkpsetlsltctvsgvslpdygv |
| CAR4- | | swirqppgkglewigviwgsettyyqsslksrvtiskdnsknqvslklssvtaad |
| Soluble | | tavyycakhyyyggsyamdywgqgtlvtvssggggsggggsggggseivmtqspa |
| scFv-aa | | tlslspgeratlscrasqdiskylnwyqqkpgqaprlliyhtsrlhsgiparfsg |
| | | sgsgtdytltisslqpedfavyfcqqgntlpytfgqgtkleikhhhhhhhh |
| 104878 | 59 | atggctctgcccgtgaccgcactcctcctgccactggctctgctgcttcacgccg |
| CAR 4- | | ctcgcccacaagtccagcttcaagaatcagggcctggtctggtgaagccatctga |
| Full-nt | | gactctgtccctcacttgcaccgtgagcggagtgtccctcccagactacggagtg |
| | | agctggattagacagcctcccggaaagggactggagtggatcggagtgatttggg |
| | | gtagcgaaaccacttactatcaatcttccctgaagtcacgggtcaccatttcaaa |
| | | ggataactcaaagaatcaagtgagcctcaagctctcatcagtcaccgccgctgac |
| | | accgccgtgtattactgtgccaagcattactactatggagggtcctacgccatgg |
| | | actactggggccagggaactctggtcactgtgtcatctggtggaggaggtagcgg |
| | | aggaggcgggagcggtggaggtggctccgaaatcgtgatgacccagagccctgca |
| | | accctgtccctttctcccggggaacgggctaccctttcttgtcgggcatcacaag |
| | | atatctcaaaatacctcaattggtatcaacagaagccgggacaggcccctaggct |
| | | tcttatctaccacacctctcgcctgcatagcgggattcccgcacgctttagcggg |
| | | tctggaagcgggaccgactacactctgaccatctcatctctccagcccgaggact |
| | | tcgccgtctacttctgccagcagggtaacaccctgccgtacaccttcggccaggg |
| | | caccaagcttgagatcaaaaccactactcccgctccaaggccacccacccctgcc |
| | | ccgaccatcgcctctcagccgctttccctgcgtccggaggcatgtagacccgcag |
| | | ctggtggggccgtgcatacccggggtcttgacttcgcctgcgatatctacatttg |
| | | ggcccctctggctggtacttgcggggtcctgctgctttcactcgtgatcactctt |
| | | tactgtaagcgcggtcggaagaagctgctgtacatctttaagcaacccttcatga |
| | | ggcctgtgcagactactcaagaggaggacggctgttcatgccggttcccagagga |
| | | ggaggaaggcggctgcgaactgcgcgtgaaattcagccgcagcgcagatgctcca |
| | | gcctacaagcaggggcagaaccagctctacaacgaactcaatcttggtcggagag |
| | | aggagtacgacgtgctggacaagcggagaggacgggacccagaaatgggcgggaa |
| | | gccgcgcagaaagaatccccaagagggcctgtacaacgagctccaaaaggataag |
| | | atggcagaagcctatagcgagattggtatgaaaggggaacgcagaagaggcaaag |
| | | gccacgacggactgtaccagggactcagcaccgccaccaaggacacctatgacgc |
| | | tcttcacatgcaggccctgccgcctcgg |
| 104878 | 60 | MALPVTALLLPLALLLHAARPqvqlqesgpglvkpsetlsltctvsgvslpdygv |
| CAR 4- | | swirqppgkglewigviwgsettyyqsslksrvtiskdnsknqvslklssvtaad |
| Full-aa | | tavyycakhyyyggsyamdywgqgtlvtvssggggsggggsggggseivmtqspa |
| | | tlslspgeratlscrasqdiskylnwyqqkpgqaprlliyhtsrlhsgiparfsg |
| | | sgsgtdytltisslqpedfavyfcqqgntlpytfgqgtkleiktttpaprpptpa |
| | | ptiasqplslrpeacrpaaggavhtrgldfacdiyiwaplagtcgvlllslvitl |
| | | yckrgrkkllyifkqpfmrpvqttqeedgcscrfpeeeeggcelrvkfsrsadap |
| | | aykqgqnqlynelnlgrreeydvldkrrgrdpemggkprrknpqeglynelqkdk |
| | | [sequence omitted] |

CAR 5

| | | |
|---|---|---|
| CAR5 scFv | 61 | eivmtqspatlslspgeratlscrasqdiskylnwyqqkpgqaprlliyhtsrlh |
| domain | | sgiparfsgsgsgtdytltisslqpedfavyfcqqgntlpytfgqgtkleikggg |
| | | gsggggsggggsggggsqvqlqesgpglvkpsetlsltctvsgvslpdygvswir |
| | | qppgkglewigviwgsettyyssslksrvtiskdnsknqvslklssvtaadtavy |
| | | ycakhyyyggsyamdywgqgtlvtvss |
| 99789 | 62 | atggccctcccagtgaccgctctgctgctgcctctcgcacttcttctccatgccg |
| CAR5- | | ctcggcctgagatcgtcatgacccaaagccccgctaccctgtccctgtcacccgg |
| Soluble | | cgagagggcaaccctttcatgcagggccagccaggacatttctaagtacctcaac |
| scFv-nt | | tggtatcagcagaagccagggcaggctcctcgcctgctgatctaccacaccagcc |
| | | gcctccacagcggtatccccgccagattttccgggagcgggtctggaaccgacta |
| | | caccctcaccatctcttctctgcagcccgaggatttcgccgtctatttctgccag |
| | | caggggaatactctgccgtacaccttcggtcaaggtaccaagctggaaatcaagg |
| | | gaggcggaggatcaggcggtggcggaagcggaggaggtggctccggaggaggagg |
| | | ttcccaagtgcagcttcaagaatcaggacccggacttgtgaagccatcagaaacc |
| | | ctctccctgacttgtaccgtgtccggtgtgagcctccccgactacggagtctctt |
| | | ggattcgccagcctccggggaagggtcttgaatggattggggtgatttggggatc |
| | | agagactacttactactcttcatcacttaagtcacgggtcaccatcagcaaagat |
| | | aatagcaagaaccaagtgtcacttaagctgtcatctgtgaccgccgctgacaccg |
| | | ccgtgtactattgtgccaaacattactattacggagggtcttatgctatggacta |
| | | ctggggacaggggaccctggtgactgtctctagccatcaccatcaccaccatcat |
| | | cac |
| 99789 | 63 | MALPVTALLLPLALLLHAARPeivmtqspatlslspgeratlscrasqdiskyln |
| CAR5- | | wyqqkpgqaprlliyhtsrlhsgiparfsgsgsgtdytltisslqpedfavyfcq |
| Soluble | | qgntlpytfgqgtkleikggggsggggsggggsggggsqvqlqesgpglvkpset |
| scFv-aa | | lsltctvsgvslpdygvswirqppgkglewigviwgsettyyssslksrvtiskd |
| | | nsknqvslklssvtaadtavyycakhyyyggsyamdywgqgtlvtvsshhhhhhh |
| | | h |
| 104879 | 64 | atggccctccctgtcaccgccctgctgcttccgctggctcttctgctccacgccg |
| CAR 5- | | ctcggcccgaaattgtgatgacccagtcacccgccactcttagcctttcacccgg |
| Full-nt | | tgagcgcgcaaccctgtcttgcagagcctcccaagacatctcaaaataccttaat |
| | | tggtatcaacagaagcccggacaggctcctcgccttctgatctaccacaccagcc |
| | | ggctccattctggaatccctgccaggttcagcggtagcggatctgggaccgacta |
| | | caccctcactatcagctcactgcagccagaggacttcgctgtctatttctgtcag |
| | | caagggaacaccctgccctacacctttggacagggcaccaagctcgagattaaag |
| | | gtggaggtggcagcggaggaggtgggtccggcggtggaggaagcggcggaggcgg |
| | | gagccaggtccaactccaagaaagcggaccgggtcttgtgaagccatcagaaact |
| | | ctttcactgacttgtactgtgagcggagtgtctctccccgattacggggtgtctt |
| | | ggatcagacagccaccggggaagggtctggaatggattggagtgatttggggctc |
| | | tgagactacttactactcttcatccctcaagtcacgcgtcaccatctcaaaggac |
| | | aactctaagaatcaggtgtcactgaaactgtcatctgtgaccgcagccgacaccg |
| | | ccgtgtactattgcgctaagcattactattatggcgggagctacgcaatggatta |
| | | ctggggacagggtactctggtcaccgtgtccagcaccactaccccagcaccgagg |
| | | ccacccaccccggctcctaccatcgcctcccagcctctgtccctgcgtccggagg |
| | | catgtagacccgcagctggtggggccgtgcatacccggggtcttgacttcgcctg |
| | | cgatatctacatttgggcccctctggctggtacttgcggggtcctgctgctttca |
| | | ctcgtgatcactctttactgtaagcgcggtcggaagaagctgctgtacatcttta |
| | | agcaacccttcatgaggcctgtgcagactactcaagaggaggacggctgttcatg |
| | | ccggttcccagaggaggaggaaggcggctgcgaactgcgcgtgaaattcagccgc |
| | | agcgcagatgctccagcctacaagcaggggcagaaccagctctacaacgaactca |
| | | atcttggtcggagagaggagtacgacgtgctggacaagcggagaggacgggaccc |
| | | agaaatgggcgggaagccgcgcagaaagaatccccaagagggcctgtacaacgag |
| | | ctccaaaaggataagatggcagaagcctatagcgagattggtatgaaaggggaac |
| | | gcagaagaggcaaaggccacgacggactgtaccagggactcagcaccgccaccaa |
| | | ggacacctatgacgctcttcacatgcaggccctgccgcctcgg |
| 104879 | 65 | MALPVTALLLPLALLLHAARPeivmtqspatlslspgeratlscrasqdiskyln |
| CAR 5- | | wyqqkpgqaprlliyhtsrlhsgiparfsgsgsgtdytltisslqpedfavyfcq |
| Full-aa | | qgntlpytfgqgtkleikggggsggggsggggsggggsqvqlqesgpglvkpset |
| | | lsltctvsgvslpdygvswirqppgkglewigviwgsettyyssslksrvtiskd |
| | | nsknqvslklssvtaadtavyycakhyyyggsyamdywgqgtlvtvsstttpapr |
| | | pptpaptiasqplslrpeacrpaaggavhtrgldfacdiyiwaplagtcgvllls |
| | | lvitlyckrgrkkllyifkqpfmrpvqttqeedgcscrfpeeeeggcelrvkfsr |
| | | sadapaykqgqnqlynelnlgrreeydvldkrrgrdpemggkprrknpqeglyne |
| | | lqkdkmaeayseigmkgerrrgkghdglyqglstatkdtydalhmqalppr |

CAR 6

| | | |
|---|---|---|
| CAR6 | 66 | eivmtqspatlslspgeratlscrasqdiskylnwyqqkpgqaprlliyhtsrlh |
| scFv | | sgiparfsgsgsgtdytltisslqpedfavyfcqqgntlpytfgqgtkleikggg |
| domain | | gsggggsggggsggggsqvqlqesgpglvkpsetlsltctvsgvslpdygvswir |
| | | qppgkglewigviwgsettyyqsslksrvtiskdnsknqvslklssvtaadtavy |
| | | ycakhyyyggsyamdywgqgtlvtvss |
| 99790 | 67 | atggccctcccagtgaccgctctgctgctgcctctcgcacttcttctccatgccg |
| CAR6- | | ctcggcctgagatcgtcatgacccaaagccccgctaccctgtccctgtcacccgg |
| Soluble | | cgagagggcaaccctttcatgcagggccagccaggacatttctaagtacctcaac |
| scFv-nt | | tggtatcagcagaagccagggcaggctcctcgcctgctgatctaccacaccagcc |
| | | gcctccacagcggtatccccgccagattttccgggagcgggtctggaaccgacta |
| | | caccctcaccatctcttctctgcagcccgaggatttcgccgtctatttctgccag |
| | | caggggaatactctgccgtacaccttcggtcaaggtaccaagctggaaatcaagg |
| | | gaggcggaggatcaggcggtggcggaagcggaggaggtggctccggaggaggagg |
| | | ttcccaagtgcagcttcaagaatcaggacccggacttgtgaagccatcagaaacc |
| | | ctctccctgacttgtaccgtgtccggtgtgagcctccccgactacggagtctctt |
| | | ggattcgccagcctccggggaagggtcttgaatggattggggtgatttggggatc |
| | | agagactacttactaccagtcatcacttaagtcacgggtcaccatcagcaaagat |
| | | aatagcaagaaccaagtgtcacttaagctgtcatctgtgaccgccgctgacaccg |
| | | ccgtgtactattgtgccaaacattactattacggagggtcttatgctatggacta |
| | | ctggggacaggggaccctggtgactgtctctagccatcaccatcaccaccatcat |
| | | cac |
| 99790 | 68 | MALPVTALLLPLALLLHAARPeivmtqspatlslspgeratlscrasqdiskyln |
| CAR6- | | wyqqkpgqaprlliyhtsrlhsgiparfsgsgsgtdytltisslqpedfavyfcq |
| Soluble | | qgntlpytfgqgtkleikggggsggggsggggsggggsqvqlqesgpglvkpset |
| scFv-aa | | lsltctvsgvslpdygvswirqppgkglewigviwgsettyyqsslksrvtiskd |
| | | nsknqvslklssvtaadtavyycakhyyyggsyamdywgqgtlvtvsshhhhhhh |
| | | h |
| 104880 | 69 | atggccctccctgtcaccgccctgctgcttccgctggctcttctgctccacgccg |
| CAR6- | | ctcggcccgaaattgtgatgacccagtcacccgccactcttagcctttcacccgg |
| Full-nt | | tgagcgcgcaaccctgtcttgcagagcctcccaagacatctcaaaataccttaat |
| | | tggtatcaacagaagcccggacaggctcctcgccttctgatctaccacaccagcc |
| | | ggctccattctggaatccctgccaggttcagcggtagcggatctgggaccgacta |
| | | caccctcactatcagctcactgcagccagaggacttcgctgtctatttctgtcag |
| | | caagggaacaccctgccctacacctttggacagggcaccaagctcgagattaaag |
| | | gtggaggtggcagcggaggaggtgggtccggcggtggaggaagcggaggcggagg |
| | | gagccaggtccaactccaagaaagcggaccgggtcttgtgaagccatcagaaact |
| | | ctttcactgacttgtactgtgagcggagtgtctctccccgattacggggtgtctt |
| | | ggatcagacagccaccggggaagggtctggaatggattggagtgatttggggctc |
| | | tgagactacttactaccaatcatccctcaagtcacgcgtcaccatctcaaaggac |
| | | aactctaagaatcaggtgtcactgaaactgtcatctgtgaccgcagccgacaccg |
| | | ccgtgtactattgcgctaagcattactattatggcgggagctacgcaatggatta |
| | | ctggggacagggtactctggtcaccgtgtccagcaccactaccccagcaccgagg |
| | | ccacccaccccggctcctaccatcgcctcccagcctctgtccctgcgtccggagg |
| | | catgtagacccgcagctggtggggccgtgcatacccggggtcttgacttcgcctg |
| | | cgatatctacatttgggcccctctggctggtacttgcggggtcctgctgctttca |
| | | ctcgtgatcactctttactgtaagcgcggtcggaagaagctgctgtacatcttta |
| | | agcaacccttcatgaggcctgtgcagactactcaagaggaggacggctgttcatg |
| | | ccggttcccagaggaggaggaaggcggctgcgaactgcgcgtgaaattcagccgc |
| | | agcgcagatgctccagcctacaagcaggggcagaaccagctctacaacgaactca |
| | | atcttggtcggagagaggagtacgacgtgctggacaagcggagaggacgggaccc |
| | | agaaatgggcgggaagccgcgcagaaagaatccccaagagggcctgtacaacgag |
| | | ctccaaaaggataagatggcagaagcctatagcgagattggtatgaaaggggaac |
| | | gcagaagaggcaaaggccacgacggactgtaccagggactcagcaccgccaccaa |
| | | ggacacctatgacgctcttcacatgcaggccctgccgcctcgg |
| 104880 | 70 | MALPVTALLLPLALLLHAARPeivmtqspatlslspgeratlscrasqdiskyln |
| CAR6- | | wyqqkpgqaprlliyhtsrlhsgiparfsgsgsgtdytltisslqpedfavyfcq |
| Full-aa | | qgntlpytfgqgtkleikggggsggggsggggsggggsqvqlqesgpglvkpset |
| | | lsltctvsgvslpdygvswirqppgkglewigviwgsettyyqsslksrvtiskd |
| | | nsknqvslklssvtaadtavyycakhyyyggsyamdywgqgtlvtvsstttpapr |
| | | pptpaptiasqplslrpeacrpaaggavhtrgldfacdiyiwaplagtcgvllls |
| | | lvitlyckrgrkkllyifkqpfmrpvqttqeedgcscrfpeeeeggcelrvkfsr |
| | | sadapaykqgqnqlynelnlgrreeydvldkrrgrdpemggkprrknpqeglyne |
| | | lqkdkmaeayseigmkgerrrgkghdglyqglstatkdtydalhmqalppr |

CAR 7

| | | |
|---|---|---|
| CAR7 scFv | 71 | qvqlqesgpglvkpsetlsltctvsgvslpdygvswirqppgkglewigviwgse |
| domain | | ttyyssslksrvtiskdnsknqvslklssvtaadtavyycakhyyyggsyamdyw |
| | | gqgtlvtvssggggsggggsggggsggggseivmtqspatlslspgeratlscra |
| | | sqdiskylnwyqqkpgqaprlliyhtsrlhsgiparfsgsgsgtdytltisslqp |
| | | edfavyfcqqgntlpytfgqgtkleik |
| 100796 | 72 | atggcactgcctgtcactgccctcctgctgcctctggccctccttctgcatgccg |
| CAR7- | | ccaggccccaagtccagctgcaagagtcaggacccggactggtgaagccgtctga |
| Soluble | | gactctctcactgacttgtaccgtcagcggcgtgtccctccccgactacggagtg |
| scFv-nt | | tcatggatccgccaacctcccgggaaagggcttgaatggattggtgtcatctggg |
| | | gttctgaaaccacctactactcatcttccctgaagtccagggtgaccatcagcaa |
| | | ggataattccaagaaccaggtcagccttaagctgtcatctgtgaccgctgctgac |
| | | accgccgtgtattactgcgccaagcactactattacggaggaagctacgctatgg |
| | | actattggggacagggcactctcgtgactgtgagcagcggcggtggagggtctgg |
| | | aggtggaggatccggtggtggtgggtcaggcggaggagggagcgagattgtgatg |
| | | actcagtcaccagccaccctttctctttcacccggcgagagagcaaccctgagct |
| | | gtagagccagccaggacatttctaagtacctcaactggtatcagcaaaaaccggg |
| | | gcaggcccctcgcctcctgatctaccatacctcacgccttcactctggtatcccc |
| | | gctcggtttagcggatcaggatctggtaccgactacactctgaccatttccagcc |
| | | tgcagccagaagatttcgcagtgtatttctgccagcagggcaatacccttcctta |
| | | caccttcggtcagggaaccaagctcgaaatcaagcaccatcaccatcatcaccac |
| | | cat |
| 100796 | 73 | MALPVTALLLPLALLLHAARPqvqlqesgpglvkpsetlsltctvsgvslpdygv |
| CAR7- | | swirqppgkglewigviwgsettyyssslksrvtiskdnsknqvslklssvtaad |
| Soluble | | tavyycakhyyyggsyamdywgqgtlvtvssggggsggggsggggsggggseivm |
| scFv-aa | | tqspatlslspgeratlscrasqdiskylnwyqqkpgqaprlliyhtsrlhsgip |
| | | arfsgsgsgtdytltisslqpedfavyfcqqgntlpytfgqgtkleikhhhhhhh |
| | | h |
| 104881 | 74 | atggctctgcccgtgaccgcactcctcctgccactggctctgctgcttcacgccg |
| CAR 7 | | ctcgcccacaagtccagcttcaagaatcagggcctggtctggtgaagccatctga |
| Full-nt | | gactctgtccctcacttgcaccgtgagcggagtgtccctcccagactacggagtg |
| | | agctggattagacagcctcccggaaagggactggagtggatcggagtgatttggg |
| | | gtagcgaaaccacttactattcatcttccctgaagtcacgggtcaccatttcaaa |
| | | ggataactcaaagaatcaagtgagcctcaagctctcatcagtcaccgccgctgac |
| | | accgccgtgtattactgtgccaagcattactactatggagggtcctacgccatgg |
| | | actactggggccagggaactctggtcactgtgtcatctggtggaggaggtagcgg |
| | | aggaggcgggagcggtggaggtggctccggaggtggcggaagcgaaatcgtgatg |
| | | acccagagccctgcaaccctgtccctttctcccggggaacgggctaccctttctt |
| | | gtcgggcatcacaagatatctcaaaatacctcaattggtatcaacagaagccggg |
| | | acaggcccctaggcttcttatctaccacacctctcgcctgcatagcgggattccc |
| | | gcacgctttagcgggtctggaagcgggaccgactacactctgaccatctcatctc |
| | | tccagcccgaggacttcgccgtctacttctgccagcagggtaacaccctgccgta |
| | | caccttcggccagggcaccaagcttgagatcaaaaccactactcccgctccaagg |
| | | ccacccacccctgccccgaccatcgcctctcagccgctttccctgcgtccggagg |
| | | catgtagacccgcagctggtggggccgtgcatacccggggtcttgacttcgcctg |
| | | cgatatctacatttgggcccctctggctggtacttgcggggtcctgctgctttca |
| | | ctcgtgatcactctttactgtaagcgcggtcggaagaagctgctgtacatcttta |
| | | agcaacccttcatgaggcctgtgcagactactcaagaggaggacggctgttcatg |
| | | ccggttcccagaggaggaggaaggcggctgcgaactgcgcgtgaaattcagccgc |
| | | agcgcagatgctccagcctacaagcaggggcagaaccagctctacaacgaactca |
| | | atcttggtcggagagaggagtacgacgtgctggacaagcggagaggacgggaccc |
| | | agaaatgggcgggaagccgcgcagaaagaatccccaagagggcctgtacaacgag |
| | | ctccaaaaggataagatggcagaagcctatagcgagattggtatgaaaggggaac |
| | | gcagaagaggcaaaggccacgacggactgtaccagggactcagcaccgccaccaa |
| | | ggacacctatgacgctcttcacatgcaggccctgccgcctcgg |
| 104881 | 75 | MALPVTALLLPLALLLHAARPqvqlqesgpglvkpsetlsltctvsgvslpdygv |
| CAR 7 | | swirqppgkglewigviwgsettyyssslksrvtiskdnsknqvslklssvtaad |
| Full-aa | | tavyycakhyyyggsyamdywgqgtlvtvssggggsggggsggggsggggseivm |
| | | tqspatlslspgeratlscrasqdiskylnwyqqkpgqaprlliyhtsrlhsgip |
| | | arfsgsgsgtdytltisslqpedfavyfcqqgntlpytfgqgtkleiktttpapr |
| | | pptpaptiasqplslrpeacrpaaggavhtrgldfacdiyiwaplagtcgvllls |
| | | lvitlyckrgrkkllyifkqpfmrpvqttqeedgcscrfpeeeeggcelrvkfsr |
| | | sadapaykqgqnqlynelnlgrreeydvldkrrgrdpemggkprrknpqeglyne |
| | | lqkdkmaeayseigmkgerrrgkghdglyqglstatkdtydalhmqalppr |

CAR 8

| | | |
|---|---|---|
| CAR8 scFv | 76 | qvqlqesgpglvkpsetlsltctvsgvslpdygvswirqppgkglewigviwgse |
| domain | | ttyyqsslksrvtiskdnsknqvslklssvtaadtavyycakhyyyggsyamdyw |
| | | gqgtlvtvssggggsggggsggggsggggseivmtqspatlslspgeratlscra |
| | | sqdiskylnwyqqkpgqaprlliyhtsrlhsgiparfsgsgsgtdytltisslqp |
| | | edfavyfcqqgntlpytfgqgtkleik |
| 100798 | 77 | atggcactgcctgtcactgccctcctgctgcctctggccctccttctgcatgccg |
| CAR8- | | ccaggccccaagtccagctgcaagagtcaggacccggactggtgaagccgtctga |
| Soluble | | gactctctcactgacttgtaccgtcagcggcgtgtccctccccgactacggagtg |
| scFv-nt | | tcatggatccgccaacctcccgggaaagggcttgaatggattggtgtcatctggg |
| | | gttctgaaaccacctactaccagtcttccctgaagtccagggtgaccatcagcaa |
| | | ggataattccaagaaccaggtcagccttaagctgtcatctgtgaccgctgctgac |
| | | accgccgtgtattactgcgccaagcactactattacggaggaagctacgctatgg |
| | | actattggggacagggcactctcgtgactgtgagcagcggcggtggagggtctgg |
| | | aggtggaggatccggtggtggtgggtcaggcggaggagggagcgagattgtgatg |
| | | actcagtcaccagccaccctttctctttcacccggcgagagagcaaccctgagct |
| | | gtagagccagccaggacatttctaagtacctcaactggtatcagcaaaaaccggg |
| | | gcaggcccctcgcctcctgatctaccatacctcacgccttcactctggtatcccc |
| | | gctcggtttagcggatcaggatctggtaccgactacactctgaccatttccagcc |
| | | tgcagccagaagatttcgcagtgtatttctgccagcagggcaatacccttcctta |
| | | caccttcggtcagggaaccaagctcgaaatcaagcaccatcaccatcatcatcac |
| | | cac |
| 100798 | 78 | MALPVTALLLPLALLLHAARPqvqlqesgpglvkpsetlsltctvsgvslpdygv |
| CAR8- | | swirqppgkglewigviwgsettyyqsslksrvtiskdnsknqvslklssvtaad |
| Soluble | | tavyycakhyyyggsyamdywgqgtlvtvssggggsggggsggggsggggseivm |
| scFv-aa | | tqspatlslspgeratlscrasqdiskylnwyqqkpgqaprlliyhtsrlhsgip |
| | | arfsgsgsgtdytltisslqpedfavyfcqqgntlpytfqqgtkleikhhhhhhh |
| | | h |
| 104882 | 79 | atggctctgcccgtgaccgcactcctcctgccactggctctgctgcttcacgccg |
| CAR 8- | | ctcgcccacaagtccagcttcaagaatcagggcctggtctggtgaagccatctga |
| Full-nt | | gactctgtccctcacttgcaccgtgagcggagtgtccctcccagactacggagtg |
| | | agctggattagacagcctcccggaaagggactggagtggatcggagtgatttggg |
| | | gtagcgaaaccacttactatcaatcttccctgaagtcacgggtcaccatttcaaa |
| | | ggataactcaaagaatcaagtgagcctcaagctctcatcagtcaccgccgctgac |
| | | accgccgtgtattactgtgccaagcattactactatggagggtcctacgccatgg |
| | | actactggggccagggaactctggtcactgtgtcatctggtggaggaggtagcgg |
| | | aggaggcgggagcggtggaggtggctccggaggcggtgggtcagaaatcgtgatg |
| | | acccagagccctgcaaccctgtccctttctcccggggaacgggctaccctttctt |
| | | gtcgggcatcacaagatatctcaaaatacctcaattggtatcaacagaagccggg |
| | | acaggcccctaggcttcttatctaccacacctctcgcctgcatagcgggattccc |
| | | gcacgctttagcgggtctggaagcgggaccgactacactctgaccatctcatctc |
| | | tccagcccgaggacttcgccgtctacttctgccagcagggtaacaccctgccgta |
| | | caccttcggccagggcaccaagcttgagatcaaaaccactactcccgctccaagg |
| | | ccacccacccctgccccgaccatcgcctctcagccgctttccctgcgtccggagg |
| | | catgtagacccgcagctggtggggccgtgcatacccggggtcttgacttcgcctg |
| | | cgatatctacatttgggcccctctggctggtacttgcggggtcctgctgctttca |
| | | ctcgtgatcactctttactgtaagcgcggtcggaagaagctgctgtacatcttta |
| | | agcaacccttcatgaggcctgtgcagactactcaagaggaggacggctgttcatg |
| | | ccggttcccagaggaggaggaaggcggctgcgaactgcgcgtgaaattcagccgc |
| | | agcgcagatgctccagcctacaagcaggggcagaaccagctctacaacgaactca |
| | | atcttggtcggagagaggagtacgacgtgctggacaagcggagaggacgggaccc |
| | | agaaatgggcgggaagccgcgcagaaagaatccccaagagggcctgtacaacgag |
| | | ctccaaaaggataagatggcagaagcctatagcgagattggtatgaaaggggaac |
| | | gcagaagaggcaaaggccacgacggactgtaccagggactcagcaccgccaccaa |
| | | ggacacctatgacgctcttcacatgcaggccctgccgcctcgg |
| 104882 | 80 | MALPVTALLLPLALLLHAARPqvqlqesgpglvkpsetlsltctvsgvslpdygv |
| CAR 8- | | swirqppgkglewigviwgsettyyqsslksrvtiskdnsknqvslklssvtaad |
| Full-aa | | tavyycakhyyyggsyamdywgqgtlvtvssggggsggggsggggsggggseivm |
| | | tqspatlslspgeratlscrasqdiskylnwyqqkpgqaprlliyhtsrlhsgip |
| | | arfsgsgsgtdytltisslqpedfavyfcqqgntlpytfgqgtkleiktttpapr |
| | | pptpaptiasqplslrpeacrpaaggavhtrgldfacdiyiwaplagtcgvllls |
| | | lvitlyckrgrkkllyifkqpfmrpvqttqeedgcscrfpeeeeggcelrvkfsr |
| | | sadapaykqgqnqlynelnlgrreeydvldkrrgrdpemggkprrknpqeglyne |
| | | lqkdkmaeayseigmkgerrrgkghdglyqglstatkdtydalhmqalppr |

CAR 9

| | | |
|---|---|---|
| CAR9 scFv | 81 | eivmtqspatlslspgeratlscrasqdiskylnwyqqkpgqaprlliyhtsrlh |
| domain | | sgiparfsgsgsgtdytltisslqpedfavyfcqqgntlpytfgqgtkleikggg |
| | | gsggggsggggsggggsqvqlqesgpglvkpsetlsltctvsgvslpdygvswir |
| | | qppgkglewigviwgsettyynsslksrvtiskdnsknqvslklssvtaadtavy |
| | | ycakhyyyggsyamdywgqgtlvtvss |
| 99789 | 82 | atggccctcccagtgaccgctctgctgctgcctctcgcacttcttctccatgccg |
| CAR9- | | ctcggcctgagatcgtcatgacccaaagccccgctaccctgtccctgtcacccgg |
| Soluble | | cgagagggcaaccctttcatgcagggccagccaggacatttctaagtacctcaac |
| scFv-nt | | tggtatcagcagaagccagggcaggctcctcgcctgctgatctaccacaccagcc |
| | | gcctccacagcggtatccccgccagattttccgggagcgggtctggaaccgacta |
| | | caccctcaccatctcttctctgcagcccgaggatttcgccgtctatttctgccag |
| | | caggggaatactctgccgtacaccttcggtcaaggtaccaagctggaaatcaagg |
| | | gaggcggaggatcaggcggtggcggaagcggaggaggtggctccggaggaggagg |
| | | ttcccaagtgcagcttcaagaatcaggacccggacttgtgaagccatcagaaacc |
| | | ctctccctgacttgtaccgtgtccggtgtgagcctccccgactacggagtctctt |
| | | ggattcgccagcctccggggaagggtcttgaatggattggggtgatttggggatc |
| | | agagactacttactacaattcatcacttaagtcacgggtcaccatcagcaaagat |
| | | aatagcaagaaccaagtgtcacttaagctgtcatctgtgaccgccgctgacaccg |
| | | ccgtgtactattgtgccaaacattactattacggagggtcttatgctatggacta |
| | | ctggggacaggggaccctggtgactgtctctagccatcaccatcaccaccatcat |
| | | cac |
| 99789 | 83 | MALPVTALLLPLALLLHAARPeivmtqspatlslspgeratlscrasqdiskyln |
| CAR9- | | wyqqkpgqaprlliyhtsrlhsgiparfsgsgsgtdytltisslqpedfavyfcq |
| Soluble | | qgntlpytfgqgtkleikggggsggggsggggsggggsqvqlqesgpglvkpset |
| scFv-aa | | lsltctvsgvslpdygvswirqppgkglewigviwgsettyynsslksrvtiskd |
| | | nsknqvslklssvtaadtavyycakhyyyggsyamdywgqgtlvtvsshhhhhhh |
| | | h |
| 105974 | 84 | atggccctccctgtcaccgccctgctgcttccgctggctcttctgctccacgccg |
| CAR 9- | | ctcggcccgaaattgtgatgacccagtcacccgccactcttagcctttcacccgg |
| Full-nt | | tgagcgcgcaaccctgtcttgcagagcctcccaagacatctcaaaataccttaat |
| | | tggtatcaacagaagcccggacaggctcctcgccttctgatctaccacaccagcc |
| | | ggctccattctggaatccctgccaggttcagcggtagcggatctgggaccgacta |
| | | caccctcactatcagctcactgcagccagaggacttcgctgtctatttctgtcag |
| | | caagggaacaccctgccctacacctttggacagggcaccaagctcgagattaaag |
| | | gtggaggtggcagcggaggaggtgggtccggcggtggaggaagcggaggcggtgg |
| | | gagccaggtccaactccaagaaagcggaccgggtcttgtgaagccatcagaaact |
| | | ctttcactgacttgtactgtgagcggagtgtctctccccgattacggggtgtctt |
| | | ggatcagacagccaccggggaagggtctggaatggattggagtgatttggggctc |
| | | tgagactacttactacaactcatccctcaagtcacgcgtcaccatctcaaaggac |
| | | aactctaagaatcaggtgtcactgaaactgtcatctgtgaccgcagccgacaccg |
| | | ccgtgtactattgcgctaagcattactattatggcgggagctacgcaatggatta |
| | | ctggggacagggtactctggtcaccgtgtccagcaccactaccccagcaccgagg |
| | | ccacccaccccggctcctaccatcgcctcccagcctctgtccctgcgtccggagg |
| | | catgtagacccgcagctggtggggccgtgcatacccggggtcttgacttcgcctg |
| | | cgatatctacatttgggcccctctggctggtacttgcggggtcctgctgctttca |
| | | ctcgtgatcactctttactgtaagcgcggtcggaagaagctgctgtacatcttta |
| | | agcaacccttcatgaggcctgtgcagactactcaagaggaggacggctgttcatg |
| | | ccggttcccagaggaggaggaaggcggctgcgaactgcgcgtgaaattcagccgc |
| | | agcgcagatgctccagcctacaagcaggggcagaaccagctctacaacgaactca |
| | | atcttggtcggagagaggagtacgacgtgctggacaagcggagaggacgggaccc |
| | | agaaatgggcgggaagccgcgcagaaagaatccccaagagggcctgtacaacgag |
| | | ctccaaaaggataagatggcagaagcctatagcgagattggtatgaaaggggaac |
| | | gcagaagaggcaaaggccacgacggactgtaccagggactcagcaccgccaccaa |
| | | ggacacctatgacgctcttcacatgcaggccctgccgcctcgg |
| 105974 | 85 | MALPVTALLLPLALLLHAARPeivmtqspatlslspgeratlscrasqdiskyln |
| CAR 9- | | wyqqkpgqaprlliyhtsrlhsgiparfsgsgsgtdytltisslqpedfavyfcq |
| Full-aa | | qgntlpytfgqgtkleikggggsggggsggggsggggsqvqlqesgpglvkpset |
| | | lsltctvsgvslpdygvswirqppgkglewigviwgsettyynsslksrvtiskd |
| | | nsknqvslklssvtaadtavyycakhyyyggsyamdywgqgtlvtvsstttpapr |
| | | pptpaptiasqplslrpeacrpaaggavhtrgldfacdiyiwaplagtcgvllls |
| | | lvitlyckrgrkkllyifkqpfmrpvqttqeedgcscrfpeeeeggcelrvkfsr |
| | | sadapaykqgqnqlynelnlgrreeydvldkrrgrdpemggkprrknpqeglyne |
| | | lqkdkmaeayseigmkgerrrgkghdglyqglstatkdtydalhmqalppr |

CAR10

| | | |
|---|---|---|
| CAR10 | 86 | qvqlqesgpglvkpsetlsltctvsgvslpdygvswirqppgkglewigviwgse |
| scFv | | ttyynsslksrvtiskdnsknqvslklssvtaadtavyycakhyyyggsyamdyw |
| domain | | gqgtlvtvssggggsggggsggggsggggseivmtqspatlslspgeratlscra |
| | | sqdiskylnwyqqkpgqaprlliyhtsrlhsgiparfsgsgsgtdytltisslqp |
| | | edfavyfcqqgntlpytfgqgtkleik |
| 100796 | 87 | atggcactgcctgtcactgccctcctgctgcctctggccctccttctgcatgccg |
| CAR10- | | ccaggccccaagtccagctgcaagagtcaggacccggactggtgaagccgtctga |
| Soluble | | gactctctcactgacttgtaccgtcagcggcgtgtccctccccgactacggagtg |
| scFv-nt | | tcatggatccgccaacctcccgggaaagggcttgaatggattggtgtcatctggg |
| | | gttctgaaaccacctactacaactcttccctgaagtccagggtgaccatcagcaa |
| | | ggataattccaagaaccaggtcagccttaagctgtcatctgtgaccgctgctgac |
| | | accgccgtgtattactgcgccaagcactactattacggaggaagctacgctatgg |
| | | actattggggacagggcactctcgtgactgtgagcagcggcggtggagggtctgg |
| | | aggtggaggatccggtggtggtgggtcaggcggaggagggagcgagattgtgatg |
| | | actcagtcaccagccaccctttctctttcacccggcgagagagcaaccctgagct |
| | | gtagagccagccaggacatttctaagtacctcaactggtatcagcaaaaaccggg |
| | | gcaggcccctcgcctcctgatctaccatacctcacgccttcactctggtatcccc |
| | | gctcggtttagcggatcaggatctggtaccgactacactctgaccatttccagcc |
| | | tgcagccagaagatttcgcagtgtatttctgccagcagggcaatacccttcctta |
| | | caccttcggtcagggaaccaagctcgaaatcaagcaccatcaccatcatcaccac |
| | | cat |
| 100796 | 88 | MALPVTALLLPLALLLHAARPqvqlqesgpglvkpsetlsltctvsgvslpdygv |
| CAR10- | | swirqppgkglewigviwgsettyynsslksrvtiskdnsknqvslklssvtaad |
| Soluble | | tavyycakhyyyggsyamdywgqgtlvtvssggggsggggsggggsggggseivm |
| scFv-aa | | tqspatlslspgeratlscrasqdiskylnwyqqkpgqaprlliyhtsrlhsgip |
| | | arfsgsgsgtdytltisslqpedfavyfcqqgntlpytfgqgtkleikhhhhhhh |
| | | h |
| 105975 | 89 | atggccctccctgtcaccgccctgctgcttccgctggctcttctgctccacgccg |
| CAR 10 | | ctcggcccgaaattgtgatgacccagtcacccgccactcttagcctttcacccgg |
| Full-nt | | tgagcgcgcaaccctgtcttgcagagcctcccaagacatctcaaaataccttaat |
| | | tggtatcaacagaagcccggacaggctcctcgccttctgatctaccacaccagcc |
| | | ggctccattctggaatccctgccaggttcagcggtagcggatctgggaccgacta |
| | | caccctcactatcagctcactgcagccagaggacttcgctgtctatttctgtcag |
| | | caagggaacaccctgccctacacctttggacagggcaccaagctcgagattaaag |
| | | gtggaggtggcagcggaggaggtgggtccggcggtggaggaagcggaggcggtgg |
| | | gagccaggtccaactccaagaaagcggaccgggtcttgtgaagccatcagaaact |
| | | ctttcactgacttgtactgtgagcggagtgtctctccccgattacggggtgtctt |
| | | ggatcagacagccaccggggaagggtctggaatggattggagtgatttggggctc |
| | | tgagactacttactacaactcatccctcaagtcacgcgtcaccatctcaaaggac |
| | | aactctaagaatcaggtgtcactgaaactgtcatctgtgaccgcagccgacaccg |
| | | ccgtgtactattgcgctaagcattactattatggcgggagctacgcaatggatta |
| | | ctggggacagggtactctggtcaccgtgtccagcaccactaccccagcaccgagg |
| | | ccacccaccccggctcctaccatcgcctcccagcctctgtccctgcgtccggagg |
| | | catgtagacccgcagctggtggggccgtgcatacccggggtcttgacttcgcctg |
| | | cgatatctacatttgggcccctctggctggtacttgcggggtcctgctgctttca |
| | | ctcgtgatcactctttactgtaagcgcggtcggaagaagctgctgtacatcttta |
| | | agcaacccttcatgaggcctgtgcagactactcaagaggaggacggctgttcatg |
| | | ccggttcccagaggaggaggaaggcggctgcgaactgcgcgtgaaattcagccgc |
| | | agcgcagatgctccagcctacaagcaggggcagaaccagctctacaacgaactca |
| | | atcttggtcggagagaggagtacgacgtgctggacaagcggagaggacgggaccc |
| | | agaaatgggcgggaagccgcgcagaaagaatccccaagagggcctgtacaacgag |
| | | ctccaaaaggataagatggcagaagcctatagcgagattggtatgaaaggggaac |
| | | gcagaagaggcaaaggccacgacggactgtaccagggactcagcaccgccaccaa |
| | | ggacacctatgacgctcttcacatgcaggccctgccgcctcgg |
| 105975 | 90 | MALPVTALLLPLALLLHAARPEIVMTQSPATLSLSPGERATLSCRASQDISKYLN |
| CAR 10 | | WYQQKPGQAPRLLIYHTSRLHSGIPARFSGSGSGTDYTLTISSLQPEDFAVYFCQ |
| Full-aa | | QGNTLPYTFGQGTKLEIKGGGGSGGGGSGGGGSGGGGSQVQLQESGPGLVKPSET |
| | | LSLTCTVSGVSLPDYGVSWIRQPPGKGLEWIGVIWGSETTYYNSSLKSRVTISKD |
| | | NSKNQVSLKLSSVTAADTAVYYCAKHYYYGGSYAMDYWGQGTLVTVSSTTTPAPR |
| | | PPTPAPTIASQPLSLRPEACRPAAGGAVHTRGLDFACDIYIWAPLAGTCGVLLLS |
| | | LVITLYCKRGRKKLLYIFKQPFMRPVQTTQEEDGCSCRFPEEEEGGCELRVKFSR |
| | | SADAPAYKQGQNQLYNELNLGRREEYDVLDKRRGRDPEMGGKPRRKNPQEGLYNE |
| | | LQKDKMAEAYSEIGMKGERRRGKGHDGLYQGLSTATKDTYDALHMQALPPR |

CAR11

| | | |
|---|---|---|
| CAR11 | 91 | eivmtqspatlslspgeratlscrasqdiskylnwyqqkpgqaprlliyhtsrlh |
| scFv | | sgiparfsgsgsgtdytltisslqpedfavyfcqqgntlpytfgqgtkleikggg |
| domain | | gsggggsggggsqvqlqesgpglvkpsetlsltctvsgvslpdygvswirqppgk |
| | | glewigviwgsettyynsslksrvtiskdnsknqvslklssvtaadtavyycakh |
| | | yyyggsyamdywgqgtlvtvss |
| 103101 | 92 | Atggccctccctgtcaccgccctgctgcttccgctggctcttctgctccacgccg |
| CAR11- | | ctcggcccgaaattgtgatgacccagtcacccgccactcttagcctttcacccgg |
| Soluble | | tgagcgcgcaaccctgtcttgcagagcctcccaagacatctcaaaataccttaat |
| scFv-nt | | tggtatcaacagaagcccggacaggctcctcgccttctgatctaccacaccagcc |
| | | ggctccattctggaatccctgccaggttcagcggtagcggatctgggaccgacta |
| | | caccctcactatcagctcactgcagccagaggacttcgctgtctatttctgtcag |
| | | caagggaacaccctgccctacacctttggacagggcaccaagctcgagattaaag |
| | | gtggaggtggcagcggaggaggtgggtccggcggtggaggaagccaggtccaact |
| | | ccaagaaagcggaccgggtcttgtgaagccatcagaaactctttcactgacttgt |
| | | actgtgagcggagtgtctctccccgattacggggtgtcttggatcagacagccac |
| | | cggggaagggtctggaatggattggagtgatttggggctctgagactacttacta |
| | | caattcatccctcaagtcacgcgtcaccatctcaaaggacaactctaagaatcag |
| | | gtgtcactgaaactgtcatctgtgaccgcagccgacaccgccgtgtactattgcg |
| | | ctaagcattactattatggcgggagctacgcaatggattactggggacagggtac |
| | | tctggtcaccgtgtccagccaccaccatcatcaccatcaccat |
| 103101 | 93 | MALPVTALLLPLALLLHAARPeivmtqspatlslspgeratlscrasqdiskyln |
| CAR11- | | wyqqkpgqaprlliyhtsrlhsgiparfsgsgsgtdytltisslqpedfavyfcq |
| Soluble | | qgntlpytfgqgtkleikggggsggggsggggsqvqlqesgpglvkpsetlsltc |
| scFv-aa | | tvsgvslpdygvswirqppgkglewigviwgsettyynsslksrvtiskdnsknq |
| | | vslklssvtaadtavyycakhyyyggsyamdywgqgtlvtvsshhhhhhhh |
| 105976 | 94 | atggctctgcccgtgaccgcactcctcctgccactggctctgctgcttcacgccg |
| CAR 11 | | ctcgcccacaagtccagcttcaagaatcagggcctggtctggtgaagccatctga |
| Full-nt | | gactctgtccctcacttgcaccgtgagcggagtgtccctcccagactacggagtg |
| | | agctggattagacagcctcccggaaagggactggagtggatcggagtgatttggg |
| | | gtagcgaaaccacttactataactcttccctgaagtcacgggtcaccatttcaaa |
| | | ggataactcaaagaatcaagtgagcctcaagctctcatcagtcaccgccgctgac |
| | | accgccgtgtattactgtgccaagcattactactatggagggtcctacgccatgg |
| | | actactggggccagggaactctggtcactgtgtcatctggtggaggaggtagcgg |
| | | aggaggcgggagcggtggaggtggctccggaggtggcggaagcgaaatcgtgatg |
| | | acccagagccctgcaaccctgtccctttctcccggggaacgggctaccctttctt |
| | | gtcgggcatcacaagatatctcaaaatacctcaattggtatcaacagaagccggg |
| | | acaggcccctaggcttcttatctaccacacctctcgcctgcatagcgggattccc |
| | | gcacgctttagcgggtctggaagcgggaccgactacactctgaccatctcatctc |
| | | tccagcccgaggacttcgccgtctacttctgccagcagggtaacaccctgccgta |
| | | caccttcggccagggcaccaagcttgagatcaaaaccactactcccgctccaagg |
| | | ccacccacccctgccccgaccatcgcctctcagccgctttccctgcgtccggagg |
| | | catgtagacccgcagctggtggggccgtgcatacccggggtcttgacttcgcctg |
| | | cgatatctacatttgggcccctctggctggtacttgcggggtcctgctgctttca |
| | | ctcgtgatcactctttactgtaagcgcggtcggaagaagctgctgtacatcttta |
| | | agcaacccttcatgaggcctgtgcagactactcaagaggaggacggctgttcatg |
| | | ccggttcccagaggaggaggaaggcggctgcgaactgcgcgtgaaattcagccgc |
| | | agcgcagatgctccagcctacaagcaggggcagaaccagctctacaacgaactca |
| | | atcttggtcggagagaggagtacgacgtgctggacaagcggagaggacgggaccc |
| | | agaaatgggcgggaagccgcgcagaaagaatccccaagagggcctgtacaacgag |
| | | ctccaaaaggataagatggcagaagcctatagcgagattggtatgaaaggggaac |
| | | gcagaagaggcaaaggccacgacggactgtaccagggactcagcaccgccaccaa |
| | | ggacacctatgacgctcttcacatgcaggccctgccgcctcgg |
| 105976 | 95 | MALPVTALLLPLALLLHAARPQVQLQESGPGLVKPSETLSLTCTVSGVSLPDYGV |
| CAR 11 | | SWIRQPPGKGLEWIGVIWGSETTYYNSSLKSRVTISKDNSKNQVSLKLSSVTAAD |
| Full-aa | | TAVYYCAKHYYYGGSYAMDYWGQGTLVTVSSGGGGSGGGGSGGGGSGGGGSEIVM |
| | | TQSPATLSLSPGERATLSCRASQDISKYLNWYQQKPGQAPRLLIYHTSRLHSGIP |
| | | ARFSGSGSGTDYTLTISSLQPEDFAVYFCQQGNTLPYTFGQGTKLEIKTTTPAPR |
| | | PPTPAPTIASQPLSLRPEACRPAAGGAVHTRGLDFACDIYIWAPLAGTCGVLLLS |
| | | LVITLYCKRGRKKLLYIFKQPFMRPVQTTQEEDGCSCRFPEEEEGGCELRVKFSR |
| | | SADAPAYKQGQNQLYNELNLGRREEYDVLDKRRGRDPEMGGKPRRKNPQEGLYNE |
| | | LQKDKMAEAYSEIGMKGERRRGKGHDGLYQGLSTATKDTYDALHMQALPPR |

CAR12

| | | |
|---|---|---|
| CAR12 | 96 | qvqlqesgpglvkpsetlsltctvsgvslpdygvswirqppgkglewigviwgse |
| scFv | | ttyynsslksrvtiskdnsknqvslklssvtaadtavyycakhyyyggsyamdyw |
| domain | | gqgtlvtvssggggsggggsggggseivmtqspatlslspgeratlscrasqdis |
| | | kylnwyqqkpgqaprlliyhtsrlhsgiparfsgsgsgtdytltisslqpedfav |
| | | yfcqqgntlpytfgqgtkleik |
| 103104 | 97 | atggctctgcccgtgaccgcactcctcctgccactggctctgctgcttcacgccg |
| CAR12- | | ctcgcccacaagtccagcttcaagaatcagggcctggtctggtgaagccatctga |
| Soluble | | gactctgtccctcacttgcaccgtgagcggagtgtccctcccagactacggagtg |
| scFv-nt | | agctggattagacagcctcccggaaagggactggagtggatcggagtgatttggg |
| | | gtagcgaaaccacttactataactcttccctgaagtcacgggtcaccatttcaaa |
| | | ggataactcaaagaatcaagtgagcctcaagctctcatcagtcaccgccgctgac |
| | | accgccgtgtattactgtgccaagcattactactatggagggtcctacgccatgg |
| | | actactggggccagggaactctggtcactgtgtcatctggtggaggaggtagcgg |
| | | aggaggcgggagcggtggaggtggctccgaaatcgtgatgacccagagccctgca |
| | | accctgtccctttctcccggggaacgggctaccctttcttgtcgggcatcacaag |
| | | atatctcaaaatacctcaattggtatcaacagaagccgggacaggcccctaggct |
| | | tcttatctaccacacctctcgcctgcatagcgggattcccgcacgctttagcggg |
| | | tctggaagcgggaccgactacactctgaccatctcatctctccagcccgaggact |
| | | tcgccgtctacttctgccagcagggtaacaccctgccgtacaccttcggccaggg |
| | | caccaagcttgagatcaaacatcaccaccatcatcaccatcac |
| 103104 | 98 | MALPVTALLLPLALLLHAARPqvqlqesgpglvkpsetlsltctvsgvslpdygv |
| CAR12- | | swirqppgkglewigviwgsettyynsslksrvtiskdnsknqvslklssvtaad |
| Soluble | | tavyycakhyyyggsyamdywgqgtlvtvssggggsggggsggggseivmtqspa |
| scFv-aa | | tlslspgeratlscrasqdiskylnwyqqkpgqaprlliyhtsrlhsgiparfsg |
| | | sgsgtdytltisslqpedfavyfcqqgntlpytfgqgtkleikhhhhhhhh |
| 105977 | 99 | atggccctccctgtcaccgccctgctgcttccgctggctcttctgctccacgccg |
| CAR 12- | | ctcggcccgaaattgtgatgacccagtcacccgccactcttagcctttcacccgg |
| Full-nt | | tgagcgcgcaaccctgtcttgcagagcctcccaagacatctcaaaataccttaat |
| | | tggtatcaacagaagcccggacaggctcctcgccttctgatctaccacaccagcc |
| | | ggctccattctggaatccctgccaggttcagcggtagcggatctgggaccgacta |
| | | caccctcactatcagctcactgcagccagaggacttcgctgtctatttctgtcag |
| | | caagggaacaccctgccctacacctttggacagggcaccaagctcgagattaaag |
| | | gtggaggtggcagcggaggaggtgggtccggcggtggaggaagccaggtccaact |
| | | ccaagaaagcggaccgggtcttgtgaagccatcagaaactctttcactgacttgt |
| | | actgtgagcggagtgtctctccccgattacggggtgtcttggatcagacagccac |
| | | cggggaagggtctggaatggattggagtgatttggggctctgagactacttacta |
| | | caactcatccctcaagtcacgcgtcaccatctcaaaggacaactctaagaatcag |
| | | gtgtcactgaaactgtcatctgtgaccgcagccgacaccgccgtgtactattgcg |
| | | ctaagcattactattatggcgggagctacgcaatggattactggggacagggtac |
| | | tctggtcaccgtgtccagcaccactaccccagcaccgaggccacccaccccggct |
| | | cctaccatcgcctcccagcctctgtccctgcgtccggaggcatgtagacccgcag |
| | | ctggtggggccgtgcatacccggggtcttgacttcgcctgcgatatctacatttg |
| | | ggcccctctggctggtacttgcggggtcctgctgctttcactcgtgatcactctt |
| | | tactgtaagcgcggtcggaagaagctgctgtacatctttaagcaacccttcatga |
| | | ggcctgtgcagactactcaagaggaggacggctgttcatgccggttcccagagga |
| | | ggaggaaggcggctgcgaactgcgcgtgaaattcagccgcagcgcagatgctcca |
| | | gcctacaagcaggggcagaaccagctctacaacgaactcaatcttggtcggagag |
| | | aggagtacgacgtgctggacaagcggagaggacgggacccagaaatgggcgggaa |
| | | gccgcgcagaaagaatccccaagagggcctgtacaacgagctccaaaaggataag |
| | | atggcagaagcctatagcgagattggtatgaaaggggaacgcagaagaggcaaag |
| | | gccacgacggactgtaccagggactcagcaccgccaccaaggacacctatgacgc |
| | | tcttcacatgcaggccctgccgcctcgg |
| 105977 | 100 | MALPVTALLLPLALLLHAARPEIVMTQSPATLSLSPGERATLSCRASQDISKYLN |
| CAR 12- | | WYQQKPGQAPRLLIYHTSRLHSGIPARFSGSGSGTDYTLTISSLQPEDFAVYFCQ |
| Full-aa | | QGNTLPYTFGQGTKLEIKGGGGSGGGGSGGGGSQVQLQESGPGLVKPSETLSLTC |
| | | TVSGVSLPDYGVSWIRQPPGKGLEWIGVIWGSETTYYNSSLKSRVTISKDNSKNQ |
| | | VSLKLSSVTAADTAVYYCAKHYYYGGSYAMDYWGQGTLVTVSSTTTPAPRPPTPA |
| | | PTIASQPLSLRPEACRPAAGGAVHTRGLDFACDIYIWAPLAGTCGVLLLSLVITL |
| | | YCKRGRKKLLYIFKQPFMRPVQTTQEEDGCSCRFPEEEEGGCELRVKFSRSADAP |
| | | AYKQGQNQLYNELNLGRREEYDVLDKRRGRDPEMGGKPRRKNPQEGLYNELQKDK |
| | | [sequence omitted] |

CTL019

| | | |
|---|---|---|
| CTL019- | 101 | atggccctgcccgtcaccgctctgctgctgccccttgctctgcttcttcatgcag |
| Soluble | | caaggccggacatccagatgacccaaaccacctcatccctctctgcctctcttgg |
| scFv-Histag- | | agacagggtgaccatttcttgtcgcgccagccaggacatcagcaagtatctgaac |
| nt | | tggtatcagcagaagccggacggaaccgtgaagctcctgatctaccatacctctc |
| | | gcctgcatagcggcgtgccctcacgcttctctggaagcggatcaggaaccgatta |
| | | ttctctcactatttcaaatcttgagcaggaagatattgccacctatttctgccag |
| | | cagggtaataccctgccctacaccttcggaggagggaccaagctcgaaatcaccg |
| | | gtggaggaggcagcggcggtggagggtctggtggaggtggttctgaggtgaagct |
| | | gcaagaatcaggccctggacttgtggccccttcacagtccctgagcgtgacttgc |
| | | accgtgtccggagtctccctgcccgactacggagtgtcatggatcagacaacctc |
| | | cacggaaaggactggaatggctcggtgtcatctggggtagcgaaactacttacta |
| | | caattcagccctcaaaagcaggctgactattatcaaggacaacagcaagtcccaa |
| | | gtctttcttaagatgaactcactccagactgacgacaccgcaatctactattgtg |
| | | ctaagcactactactacggaggatcctacgctatggattactggggacaaggtac |
| | | ttccgtcactgtctcttcacaccatcatcaccatcaccatcac |
| CTL019- | 102 | MALPVTALLLPLALLLHAARPdiqmtqttsslsaslgdrvtiscrasqdiskyln |
| Soluble | | wyqqkpdgtvklliyhtsrlhsgvpsrfsgsgsgtdysltisnleqediatyfcq |
| scFv-Histag- | | qgntlpytfgggtkleitggggsggggsggggsevklqesgpglvapsqslsvtc |
| aa | | tvsgvslpdygvswirqpprkglewlgviwgsettyynsalksrltiikdnsksq |
| | | vflkmnslqtddtaiyycakhyyyggsyamdywgqgtsvtvsshhhhhhhh |
| CTL019 | 103 | atggccttaccagtgaccgccttgctcctgccgctggccttgctgctccacgccg |
| Full-nt | | ccaggccggacatccagatgacacagactacatcctccctgtctgcctctctggg |
| | | agacagagtcaccatcagttgcagggcaagtcaggacattagtaaatatttaaat |
| | | tggtatcagcagaaaccagatggaactgttaaactcctgatctaccatacatcaa |
| | | gattacactcaggagtcccatcaaggttcagtggcagtgggtctggaacagatta |
| | | ttctctcaccattagcaacctggagcaagaagatattgccacttacttttgccaa |
| | | cagggtaatacgcttccgtacacgttcggaggggggaccaagctggagatcacag |
| | | gtggcggtggctcgggcggtggtgggtcgggtggcggcggatctgaggtgaaact |
| | | gcaggagtcaggacctggcctggtggcgccctcacagagcctgtccgtcacatgc |
| | | actgtctcaggggtctcattacccgactatggtgtaagctggattcgccagcctc |
| | | cacgaaagggtctggagtggctgggagtaatatggggtagtgaaaccacatacta |
| | | taattcagctctcaaatccagactgaccatcatcaaggacaactccaagagccaa |
| | | gttttcttaaaaatgaacagtctgcaaactgatgacacagccatttactactgtg |
| | | ccaaacattattactacggtggtagctatgctatggactactggggccaaggaac |
| | | ctcagtcaccgtctcctcaaccacgacgccagcgccgcgaccaccaacaccggcg |
| | | cccaccatcgcgtcgcagcccctgtccctgcgcccagaggcgtgccggccagcgg |
| | | cggggggcgcagtgcacacgagggggctggacttcgcctgtgatatctacatctg |
| | | ggcgcccttggccgggacttgtggggtccttctcctgtcactggttatcaccctt |
| | | tactgcaaacggggcagaaagaaactcctgtatatattcaaacaaccatttatga |
| | | gaccagtacaaactactcaagaggaagatggctgtagctgccgatttccagaaga |
| | | agaagaaggaggatgtgaactgagagtgaagttcagcaggagcgcagacgccccc |
| | | gcgtacaagcagggccagaaccagctctataacgagctcaatctaggacgaagag |
| | | aggagtacgatgttttggacaagagacgtggccgggaccctgagatggggggaaa |
| | | gccgagaaggaagaaccctcaggaaggcctgtacaatgaactgcagaaagataag |
| | | atggcggaggcctacagtgagattgggatgaaaggcgagcgccggaggggcaagg |
| | | ggcacgatggcctttaccagggtctcagtacagccaccaaggacacctacgacgc |
| | | ccttcacatgcaggccctgccccctcgc |
| CTL019 | 104 | MALPVTALLLPLALLLHAARPdiqmtqttsslsaslgdrvtiscrasqdiskyln |
| Full-aa | | wyqqkpdgtvklliyhtsrlhsgvpsrfsgsgsgtdysltisnleqediatyfcq |
| | | qgntlpytfgggtkleitggggsggggsggggsevklqesgpglvapsqslsvtc |
| | | tvsgvslpdygvswirqpprkglewlgviwgsettyynsalksrltiikdnsksq |
| | | vflkmnslqtddtaiyycakhyyyggsyamdywgqgtsvtvsstttpaprpptpa |
| | | ptiasqplslrpeacrpaaggavhtrgldfacdiyiwaplagtcgvlllslvitl |
| | | yckrgrkkllyifkqpfmrpvqttqeedgcscrfpeeeeggcelrvkfsrsadap |
| | | aykqgqnqlynelnlgrreeydvldkrrgrdpemggkprrknpqeglynelqkdk |
| | | [sequence omitted] |
| CTL019 | 105 | diqmtqttsslsaslgdrvtiscrasqdiskylnwyqqkpdgtvklliyhtsrlh |
| scFv | | sgvpsrfsgsgsgtdysltisnleqediatyfcqqgntlpytfgggtkleitggg |
| domain | | gsggggsggggsevklqesgpglvapsqslsvtctvsgvslpdygvswirqpprk |
| | | glewlgviwgsettyynsalksrltiikdnsksqvflkmnslqtddtaiyycakh |
| | | yyyggsyamdywgqgtsvtvss |
| mCAR1 | 106 | QVQLLESGAELVRPGSSVKISCKASGYAFSSYWMNWVKQRPGQGLEWIGQIYPGD |
| scFv | | GDTNYNGKFKGQATLTADKSSSTAYMQLSGLTSEDSAVYSCARKTISSVVDFYFD |
| | | YWGQGTTVTGGGSGGGSGGGSGGGSELVLTQSPKFMSTSVGDRVSVTCKASQNVG |
| | | TNVAWYQQKPGQSPKPLIYSATYRNSGVPDRFTGSGSGTDFTLTITNVQSKDLAD |
| | | YFCQYNRYPYTSFFFTKLEIKRRS |
| mCAR1 | 107 | QVQLLESGAELVRPGSSVKISCKASGYAFSSYWMNWVKQRPGQGLEWIGQIYPGD |
| Full-aa | | GDTNYNGKFKGQATLTADKSSSTAYMQLSGLTSEDSAVYSCARKTISSVVDFYFD |
| | | YWGQGTTVTGGGSGGGSGGGSGGGSELVLTQSPKFMSTSVGDRVSVTCKASQNVG |
| | | TNVAWYQQKPGQSPKPLIYSATYRNSGVPDRFTGSGSGTDFTLTITNVQSKDLAD |
| | | YFCQYNRYPYTSFFFTKLEIKRRSKIEVMYPPPYLDNEKSNGTIIHVKGKHLCPS |
| | | PLFPGPSKPFWVLVVVGGVLACYSLLVTVAFIIFWVRSKRSRLLHSDYMNMTPRR |
| | | PGPTRKHYQPYAPPRDFAAYRSRVKFSRSADAPAYQQGQNQLYNELNLGRREEYD |
| | | VLDKRRGRDPEMGGKPRRKNPQEGLYNELQKDKMAEAYSEIGMKGERRRGKGHDG |
| | | LYQGLSTATKDTYDALHMQALPPR |
| mCAR2 | 108 | DIQMTQTTSSLSASLGDRVTISCRASQDISKYLNWYQQKPDGTVKLLIYHTSRLH |
| scFv | | SGVPSRFSGSGSGTDYSLTISNLEQEDIATYFCQQGNTLPYTFGGGTKLEITGST |
| | | SGSGKPGSGEGSTKGEVKLQESGPGLVAPSQSLSVTCTVSGVSLPDYGVSWIRQP |
| | | PRKGLEWLGVIWGSETTYYNSALKSRLTIIKDNSKSQVFLKMNSLQTDDTAIYYC |
| | | AKHYYYGGSYAMDYWGQGTSVTVSSE |
| mCAR2 | 109 | DIQMTQTTSSLSASLGDRVTISCRASQDISKYLNWYQQKPDGTVKLLIYHTSRLH |
| CAR-aa | | SGVPSRFSGSGSGTDYSLTISNLEQEDIATYFCQQGNTLPYTFGGGTKLEITGST |
| | | SGSGKPGSGEGSTKGEVKLQESGPGLVAPSQSLSVTCTVSGVSLPDYGVSWIRQP |
| | | PRKGLEWLGVIWGSETTYYNSALKSRLTIIKDNSKSQVFLKMNSLQTDDTAIY |
| | | YCAKHYYYGGSYAMDYWGQGTSVTVSSESKYGPPCPPCPMFWVLVVVGGVLACYS |
| | | LLVTVAFIIFWVKRGRKKLLYIFKQPFMRPVQTTQEEDGCSCRFEEEEGGCELRV |
| | | KFSRSADAPAYQQGQNQLYNELNLGRREEYDVLDKRRGRDPEMGGKPRRKNPQEG |
| | | LYNELQKDKMAEAYSEIGMKGERRRGKGHDGLYQGLSTATKDTYDALHMQALPPR |
| | | L |
| mCAR2 | 110 | DIQMTQTT SSLSASLGDR VTISCRASQD ISKYLNWYQQ KPDGTVKLLI |
| Full-aa | | YHTSRLHSGV PSRFSGSGSG TDYSLTISNL EQEDIATYFC QQGNTLPYTF |
| | | GGGTKLEITG STSGSGKPGS GEGSTKGEVK LQESGPGLVA PSQSLSVTCT |
| | | VSGVSLPDYG VSWIRQPPRK GLEWLGVIWG SETTYYNSAL KSRLTIIKDN |
| | | SKSQVFLKMN SLQTDDTAIY YCAKHYYYGG SYAMDYWGQG TSVTVSSESK |
| | | YGPPCPPCPM FWVLVVVGGV LACYSLLVTV |
| | | AFIIFWVKRG RKKLLYIFKQ PFMRPVQTTQ EEDGCSCRFE EEEGGCELRV |
| | | KFSRSADAPA YQQGQNQLYN ELNLGRREEY DVLDKRRGRD PEMGGKPRRK |
| | | NPQEGLYNEL QKDKMAEAYS EIGMKGERRR GKGHDGLYQG LSTATKDTYD |
| | | ALHMQALPPR LEGGGEGRGS LLTCGDVEEN PGPRMLLLVT SLLLCELPHP |
| | | AFLLIPRKVC NGIGIGEFKD SLSINATNIK HFKNCTSISG DLHILPVAFR |
| | | GDSFTHTPPL DPQELDILKT VKEITGFLLI QAWPENRTDL HAFENLEIIR |
| | | GRTKQHGQFS LAVVSLNITS LGLRSLKEIS DGDVIISGNK NLCYANTINW |
| | | KKLFGTSGQK TKIISNRGEN SCKATGQVCH ALCSPEGCWG PEPRDCVSCR |
| | | NVSRGRECVD KCNLLEGEPR EFVENSECIQ CHPECLPQAM NITCTGRGPD |
| | | NCIQCAHYID GPHCVKTCPA GVMGENNTLV WKYADAGHVC HLCHPNCTYG |
| | | CTGPGLEGCP TNGPKIPSIA TGMVGALLLL LVVALGIGLF M |
| mCAR3 | 111 | DIQMTQTTSSLSASLGDRVTISCRASQDISKYLNWYQQKPDGTVKLLIYHTSRLH |
| scFv | | SGVPSRFSGSGSGTDYSLTISNLEQEDIATYFCQQGNTLPYTFGGGTKLEITGST |
| | | SGSGKPGSGEGSTKGEVKLQESGPGLVAPSQSLSVTCTVSGVSLPDYGVSWIRQP |
| | | PRKGLEWLGVIWGSETTYYNSALKSRLTIIKDNSKSQVFLKMNSLQTDDTAIYYC |
| | | AKHYYYGGSYAMDYWGQGTSVTVSS |
| mCAR3 | 112 | DIQMTQTTSSLSASLGDRVTISCRASQDISKYLNWYQQKPDGTVKLLIYHTSRLH |
| Full-aa | | SGVPSRFSGSGSGTDYSLTISNLEQEDIATYFCQQGNTLPYTFGGGTKLEITGST |
| | | SGSGKPGSGEGSTKGEVKLQESGPGLVAPSQSLSVTCTVSGVSLPDYGVSWIRQP |
| | | PRKGLEWLGVIWGSETTYYNSALKSRLTIIKDNSKSQVFLKMNSLQTDDTAIYYC |
| | | AKHYYYGGSYAMDYWGQGTSVTVSSAAAIEVMYPPPYLDNEKSNGTIIHVKGKHL |
| | | CPSPLFPGPSKPFWVLVVVGGVLACYSLLVTVAFIIFWVRSKRSRLLHSDYMNMT |
| | | PRRPGPTRKHYQPYAPPRDFAAYRSRVKFSRSADAPAYQQGQNQLYNELNLGRRE |
| | | EYDVLDKRRGRDPEMGGKPRRKNPQEGLYNELQKDKMAEAYSEIGMKGERRRGKG |
| | | HDGLYQGLSTATKDTYDALHMQALPPR |
| SSJ25-C1 | 113 | QVQLLESGAELVRPGSSVKISCKASGYAFSSYWMNWVKQRPGQGLEWIGQIYPGD |
| VH | | GDTNYNGKFKGQATLTADKSSSTAYMQLSGLTSEDSAVYSCARKTISSVVDFYFD |
| sequence | | YWGQGTTVT |
| SSJ25-C1 | 114 | ELVLTQSPKFMSTSVGDRVSVTCKASQNVGTNVAWYQQKPGQSPKPLIYSATYRN |
| VL | | SGVPDRFTGSGSGTDFTLTITNVQSKDLADYFYFCQYNRYPYTSGGGTKLEIKRR |
| sequence | | S |

[0390] In some embodiments, the CD19 CAR or binding domain includes the amino acid sequence of CTL019, or is encoded by the nucleotide sequence of CTL019 according to Table 3 with or without the leader sequence or the his tag, or a sequence substantially identical thereto (e.g., at least 85%, 90%, 95% or higher identity).

[0391] In some embodiments, the CDRs are defined according to the Kabat numbering scheme, the Chothia numbering scheme, or a combination thereof.

[0392] The sequences of humanized CDR sequences of the scFv domains are shown in Table 4A for the heavy chain variable domains and in Table 4B for the light chain variable domains. “ID” stands for the respective SEQ ID NO for each CDR.

TABLE 3
Heavy Chain Variable Domain CDRs (according to Kabat)

| | | | SEQ | | SEQ | | SEQ |
|---|---|---|---|---|---|---|---|
| Candidate | FW | HCDR1 | ID | HCDR2 | ID | HCDR3 | ID |
| murine_CART19 | | DYGVS | 115 | VIWGSETTYYNSALKS | 116 | HYYYGGSYAMDY | 117 |
| humanized_CART19 a | VH4 | DYGVS | 118 | VIWGSETTYYSSSLKS | 119 | HYYYGGSYAMDY | 120 |
| humanized_CART19 b | VH4 | DYGVS | 121 | VIWGSETTYYQSSLKS | 122 | HYYYGGSYAMDY | 123 |
| humanized_CART19 c | VH4 | DYGVS | 124 | VIWGSETTYYNSSLKS | 125 | HYYYGGSYAMDY | 126 |

TABLE 4
Light Chain Variable Domain CDRs (according to Kabat)

| | | | SEQ | | SEQ | | SEQ |
|---|---|---|---|---|---|---|---|
| Candidate | FW | LCDR1 | ID | LCDR2 | ID | LCDR3 | ID |
| murine_CART19 | | RASQDISKYLN | 127 | HTSRLHS | 128 | QQGNTLPYT | 129 |
| humanized_CART19 a | VK3 | RASQDISKYLN | 127 | HTSRLHS | 128 | QQGNTLPYT | 129 |
| humanized_CART19 b | VK3 | RASQDISKYLN | 127 | HTSRLHS | 128 | QQGNTLPYT | 129 |
| humanized_CART19 c | VK3 | RASQDISKYLN | 127 | HTSRLHS | 128 | QQGNTLPYT | 129 |

[0393] In one embodiment, the CAR molecule comprises a BCMA CAR molecule described herein, e.g., a BCMA CAR described in US-2016-0046724-A1 or WO2016/014565. In embodiments, the BCMA CAR comprises an amino acid, or has a nucleotide sequence of a CAR molecule, or an antigen binding domain according to US-2016-0046724-A1, or Table 1 or 16, SEQ ID NO: 271 or SEQ ID NO: 273 of WO2016/014565, incorporated herein by reference, or a sequence substantially identical to any of the aforesaid sequences (e.g., at least 85%, 90%, 95% or more identical to any of the aforesaid BCMA CAR sequences). The amino acid and nucleotide sequences encoding the BCMA CAR molecules and antigen binding domains (e.g., including one, two, three VH CDRs; and one, two, three VL CDRs according to Kabat or Chothia), are specified in WO2016/014565.

[0394] In embodiments, the BCMA CAR comprises an anti-BCMA binding domain (e.g., human or humanized anti-BCMA binding domain), a transmembrane domain, and an intracellular signaling domain, and wherein said anti-BCMA binding domain comprises a heavy chain complementary determining region 1 (HC CDR1), a heavy chain complementary determining region 2 (HC CDR2), and a heavy chain complementary determining region 3 (HC CDR3) of any anti-BMCA heavy chain binding domain amino acid sequences listed in Table 5 or 6, or a sequence at least 85%, 90%, 95% or more identical thereto (e.g., having less than 5, 4, 3, 2 or 1 amino acid substitutions, e.g., conservative substitutions).

[0395] In one embodiment, the anti-BCMA binding domain comprises a light chain variable region described herein (e.g., in Table 5 or 6) and/or a heavy chain variable region described herein (e.g., in Table 5 or 6), or a sequence at least 85%, 90%, 95% or more identical thereto.

[0396] In one embodiment, the encoded anti-BCMA binding domain is a scFv comprising a light chain and a heavy chain of an amino acid sequence of Table 5 or 6.

[0397] In an embodiment, the human or humanized anti-BCMA binding domain (e.g., an scFv) comprises: a light chain variable region comprising an amino acid sequence having at least one, two or three modifications (e.g., substitutions, e.g., conservative substitutions) but not more than 30, 20 or 10 modifications (e.g., substitutions, e.g., conservative substitutions) of an amino acid sequence of a light chain variable region provided in Table 5 or 6, or a sequence at least 85%, 90%, 95% or more identical thereto; and/or a heavy chain variable region comprising an amino acid sequence having at least one, two or three modifications (e.g., substitutions, e.g., conservative substitutions) but not more than 30, 20 or 10 modifications (e.g., substitutions, e.g., conservative substitutions) of an amino acid sequence of a heavy chain variable region provided in Table 5 or 6, or a sequence at least 85%, 90%, 95% or more identical thereto.

TABLE 5
Amino Acid and Nucleic Acid Sequences of exemplary
anti-BCMA scFv domains and BCMA CAR molecules

| | | |
|---|---|---|
| | SEQ | |
| Name/ | ID | |
| Description | NO: | Sequence |

139109

| | | |
|---|---|---|
| 139109-aa | 130 | EVQLVESGGGLVQPGGSLRLSCAVSGFALSNHGMSWVRRAPGKGLEWV |
| ScFv | | SGIVYSGSTYYAASVKGRFTISRDNSRNTLYLQMNSLRPEDTAIYYCS |
| domain | | AHGGESDVWGQGTTVTVSSASGGGGSGGRASGGGGSDIQLTQSPSSLS |
| | | ASVGDRVTITCRASQSISSYLNWYQQKPGKAPKLLIYAASSLQSGVPS |
| | | RFSGSGSGTDFTLTISSLQPEDFATYYCQQSYSTPYTFGQGTKVEIK |
| 139109-nt | 131 | GAAGTGCAATTGGTGGAATCAGGGGGAGGACTTGTGCAGCCTGGAGGA |
| ScFv | | TCGCTGAGACTGTCATGTGCCGTGTCCGGCTTTGCCCTGTCCAACCAC |
| domain | | GGGATGTCCTGGGTCCGCCGCGCGCCTGGAAAGGGCCTCGAATGGGTG |
| | | TCGGGTATTGTGTACAGCGGTAGCACCTACTATGCCGCATCCGTGAAG |
| | | GGGAGATTCACCATCAGCCGGGACAACTCCAGGAACACTCTGTACCTC |
| | | CAAATGAATTCGCTGAGGCCAGAGGACACTGCCATCTACTACTGCTCC |
| | | GCGCATGGCGGAGAGTCCGACGTCTGGGGACAGGGGACCACCGTGACC |
| | | GTGTCTAGCGCGTCCGGCGGAGGCGGCAGCGGGGGTCGGGCATCAGGG |
| | | GGCGGCGGATCGGACATCCAGCTCACCCAGTCCCCGAGCTCGCTGTCC |
| | | GCCTCCGTGGGAGATCGGGTCACCATCACGTGCCGCGCCAGCCAGTCG |
| | | ATTTCCTCCTACCTGAACTGGTACCAACAGAAGCCCGGAAAAGCCCCG |
| | | AAGCTTCTCATCTACGCCGCCTCGAGCCTGCAGTCAGGAGTGCCCTCA |
| | | CGGTTCTCCGGCTCCGGTTCCGGTACTGATTTCACCCTGACCATTTCC |
| | | TCCCTGCAACCGGAGGACTTCGCTACTTACTACTGCCAGCAGTCGTAC |
| | | TCCACCCCCTACACTTTCGGACAAGGCACCAAGGTCGAAATCAAG |
| 139109-aa | 132 | EVQLVESGGGLVQPGGSLRLSCAVSGFALSNHGMSWVRRAPGKGLEWV |
| VH | | SGIVYSGSTYYAASVKGRFTISRDNSRNTLYLQMNSLRPEDTAIYYCS |
| | | AHGGESDVWGQGTTVTVSS |
| 139109-aa | 133 | DIQLTQSPSSLSASVGDRVTITCRASQSISSYLNWYQQKPGKAPKLLI |
| VL | | YAASSLQSGVPSRFSGSGSGTDFTLTISSLQPEDFATYYCQQSYSTPY |
| | | TFGQGTKVEIK |
| 139109-aa | 134 | MALPVTALLLPLALLLHAARPEVQLVESGGGLVQPGGSLRLSCAVSGF |
| Full CAR | | ALSNHGMSWVRRAPGKGLEWVSGIVYSGSTYYAASVKGRFTISRDNSR |
| | | NTLYLQMNSLRPEDTAIYYCSAHGGESDVWGQGTTVTVSSASGGGGSG |
| | | GRASGGGGSDIQLTQSPSSLSASVGDRVTITCRASQSISSYLNWYQQK |
| | | PGKAPKLLIYAASSLQSGVPSRFSGSGSGTDFTLTISSLQPEDFATYY |
| | | CQQSYSTPYTFGQGTKVEIKTTTPAPRPPTPAPTIASQPLSLRPEACR |
| | | PAAGGAVHTRGLDFACDIYIWAPLAGTCGVLLLSLVITLYCKRGRKKL |
| | | LYIFKQPFMRPVQTTQEEDGCSCRFPEEEEGGCELRVKFSRSADAPAY |
| | | KQGQNQLYNELNLGRREEYDVLDKRRGRDPEMGGKPRRKNPQEGLYNE |
| | | LQKDKMAEAYSEIGMKGERRRGKGHDGLYQGLSTATKDTYDALHMQAL |
| | | PPR |
| 139109-nt | 135 | ATGGCCCTCCCTGTCACCGCCCTGCTGCTTCCGCTGGCTCTTCTGCTC |
| Full CAR | | CACGCCGCTCGGCCCGAAGTGCAATTGGTGGAATCAGGGGGAGGACTT |
| | | GTGCAGCCTGGAGGATCGCTGAGACTGTCATGTGCCGTGTCCGGCTTT |
| | | GCCCTGTCCAACCACGGGATGTCCTGGGTCCGCCGCGCGCCTGGAAAG |
| | | GGCCTCGAATGGGTGTCGGGTATTGTGTACAGCGGTAGCACCTACTAT |
| | | GCCGCATCCGTGAAGGGGAGATTCACCATCAGCCGGGACAACTCCAGG |
| | | AACACTCTGTACCTCCAAATGAATTCGCTGAGGCCAGAGGACACTGCC |
| | | ATCTACTACTGCTCCGCGCATGGCGGAGAGTCCGACGTCTGGGGACAG |
| | | GGGACCACCGTGACCGTGTCTAGCGCGTCCGGCGGAGGCGGCAGCGGG |
| | | GGTCGGGCATCAGGGGGCGGCGGATCGGACATCCAGCTCACCCAGTCC |
| | | CCGAGCTCGCTGTCCGCCTCCGTGGGAGATCGGGTCACCATCACGTGC |
| | | CGCGCCAGCCAGTCGATTTCCTCCTACCTGAACTGGTACCAACAGAAG |
| | | CCCGGAAAAGCCCCGAAGCTTCTCATCTACGCCGCCTCGAGCCTGCAG |
| | | TCAGGAGTGCCCTCACGGTTCTCCGGCTCCGGTTCCGGTACTGATTTC |
| | | ACCCTGACCATTTCCTCCCTGCAACCGGAGGACTTCGCTACTTACTAC |
| | | TGCCAGCAGTCGTACTCCACCCCCTACACTTTCGGACAAGGCACCAAG |
| | | GTCGAAATCAAGACCACTACCCCAGCACCGAGGCCACCCACCCCGGCT |
| | | CCTACCATCGCCTCCCAGCCTCTGTCCCTGCGTCCGGAGGCATGTAGA |
| | | CCCGCAGCTGGTGGGGCCGTGCATACCCGGGGTCTTGACTTCGCCTGC |
| | | GATATCTACATTTGGGCCCCTCTGGCTGGTACTTGCGGGGTCCTGCTG |
| | | CTTTCACTCGTGATCACTCTTTACTGTAAGCGCGGTCGGAAGAAGCTG |
| | | CTGTACATCTTTAAGCAACCCTTCATGAGGCCTGTGCAGACTACTCAA |
| | | GAGGAGGACGGCTGTTCATGCCGGTTCCCAGAGGAGGAGGAAGGCGGC |
| | | TGCGAACTGCGCGTGAAATTCAGCCGCAGCGCAGATGCTCCAGCCTAC |
| | | AAGCAGGGGCAGAACCAGCTCTACAACGAACTCAATCTTGGTCGGAGA |
| | | GAGGAGTACGACGTGCTGGACAAGCGGAGAGGACGGGACCCAGAAATG |
| | | GGCGGGAAGCCGCGCAGAAAGAATCCCCAAGAGGGCCTGTACAACGAG |
| | | CTCCAAAAGGATAAGATGGCAGAAGCCTATAGCGAGATTGGTATGAAA |
| | | GGGGAACGCAGAAGAGGCAAAGGCCACGACGGACTGTACCAGGGACTC |
| | | AGCACCGCCACCAAGGACACCTATGACGCTCTTCACATGCAGGCCCTG |
| | | CCGCCTCGG |

139103

| | | |
|---|---|---|
| 139103-aa | 136 | QVQLVESGGGLVQPGRSLRLSCAASGFTFSNYAMSWVRQAPGKGLGWV |
| ScFv | | SGISRSGENTYYADSVKGRFTISRDNSKNTLYLQMNSLRDEDTAVYYC |
| domain | | ARSPAHYYGGMDVWGQGTTVTVSSASGGGGSGGRASGGGGSDIVLTQS |
| | | PGTLSLSPGERATLSCRASQSISSSFLAWYQQKPGQAPRLLIYGASRR |
| | | ATGIPDRFSGSGSGTDFTLTISRLEPEDSAVYYCQQYHSSPSWTFGQG |
| | | TKLEIK |
| 139103-nt | 137 | CAAGTGCAACTCGTGGAATCTGGTGGAGGACTCGTGCAACCCGGAAGA |
| ScFv | | TCGCTTAGACTGTCGTGTGCCGCCAGCGGGTTCACTTTCTCGAACTAC |
| domain | | GCGATGTCCTGGGTCCGCCAGGCACCCGGAAAGGGACTCGGTTGGGTG |
| | | TCCGGCATTTCCCGGTCCGGCGAAAATACCTACTACGCCGACTCCGTG |
| | | AAGGGCCGCTTCACCATCTCAAGGGACAACAGCAAAAACACCCTGTAC |
| | | TTGCAAATGAACTCCCTGCGGGATGAAGATACAGCCGTGTACTATTGC |
| | | GCCCGGTCGCCTGCCCATTACTACGGCGGAATGGACGTCTGGGGACAG |
| | | GGAACCACTGTGACTGTCAGCAGCGCGTCGGGTGGCGGCGGCTCAGGG |
| | | GGTCGGGCCTCCGGGGGGGGAGGGTCCGACATCGTGCTGACCCAGTCC |
| | | CCGGGAACCCTGAGCCTGAGCCCGGGAGAGCGCGCGACCCTGTCATGC |
| | | CGGGCATCCCAGAGCATTAGCTCCTCCTTTCTCGCCTGGTATCAGCAG |
| | | AAGCCCGGACAGGCCCCGAGGCTGCTGATCTACGGCGCTAGCAGAAGG |
| | | GCTACCGGAATCCCAGACCGGTTCTCCGGCTCCGGTTCCGGGACCGAT |
| | | TTCACCCTTACTATCTCGCGCCTGGAACCTGAGGACTCCGCCGTCTAC |
| | | TACTGCCAGCAGTACCACTCATCCCCGTCGTGGACGTTCGGACAGGGC |
| | | ACCAAGCTGGAGATTAAG |
| 139103-aa | 138 | QVQLVESGGGLVQPGRSLRLSCAASGFTFSNYAMSWVRQAPGKGLGWV |
| VH | | SGISRSGENTYYADSVKGRFTISRDNSKNTLYLQMNSLRDEDTAVYYC |
| | | ARSPAHYYGGMDVWGQGTTVTVSS |
| 139103-aa | 139 | DIVLTQSPGTLSLSPGERATLSCRASQSISSSFLAWYQQKPGQAPRLL |
| VL | | IYGASRRATGIPDRFSGSGSGTDFTLTISRLEPEDSAVYYCQQYHSSP |
| | | SWTFGQGTKLEIK |
| 139103-aa | 140 | MALPVTALLLPLALLLHAARPQVQLVESGGGLVQPGRSLRLSCAASGF |
| Full CAR | | TFSNYAMSWVRQAPGKGLGWVSGISRSGENTYYADSVKGRFTISRDNS |
| | | KNTLYLQMNSLRDEDTAVYYCARSPAHYYGGMDVWGQGTTVTVSSASG |
| | | GGGSGGRASGGGGSDIVLTQSPGTLSLSPGERATLSCRASQSISSSFL |
| | | AWYQQKPGQAPRLLIYGASRRATGIPDRFSGSGSGTDFTLTISRLEPE |
| | | DSAVYYCQQYHSSPSWTFGQGTKLEIKTTTPAPRPPTPAPTIASQPLS |
| | | LRPEACRPAAGGAVHTRGLDFACDIYIWAPLAGTCGVLLLSLVITLYC |
| | | KRGRKKLLYIFKQPFMRPVQTTQEEDGCSCRFPEEEEGGCELRVKFSR |
| | | SADAPAYKQGQNQLYNELNLGRREEYDVLDKRRGRDPEMGGKPRRKNP |
| | | QEGLYNELQKDKMAEAYSEIGMKGERRRGKGHDGLYQGLSTATKDTYD |
| | | ALHMQALPPR |
| 139103-nt | 141 | ATGGCCCTCCCTGTCACCGCCCTGCTGCTTCCGCTGGCTCTTCTGCTC |
| Full CAR | | CACGCCGCTCGGCCCCAAGTGCAACTCGTGGAATCTGGTGGAGGACTC |
| | | GTGCAACCCGGAAGATCGCTTAGACTGTCGTGTGCCGCCAGCGGGTTC |
| | | ACTTTCTCGAACTACGCGATGTCCTGGGTCCGCCAGGCACCCGGAAAG |
| | | GGACTCGGTTGGGTGTCCGGCATTTCCCGGTCCGGCGAAAATACCTAC |
| | | TACGCCGACTCCGTGAAGGGCCGCTTCACCATCTCAAGGGACAACAGC |
| | | AAAAACACCCTGTACTTGCAAATGAACTCCCTGCGGGATGAAGATACA |
| | | GCCGTGTACTATTGCGCCCGGTCGCCTGCCCATTACTACGGCGGAATG |
| | | GACGTCTGGGGACAGGGAACCACTGTGACTGTCAGCAGCGCGTCGGGT |
| | | GGCGGCGGCTCAGGGGGTCGGGCCTCCGGGGGGGGAGGGTCCGACATC |
| | | GTGCTGACCCAGTCCCCGGGAACCCTGAGCCTGAGCCCGGGAGAGCGC |
| | | GCGACCCTGTCATGCCGGGCATCCCAGAGCATTAGCTCCTCCTTTCTC |
| | | GCCTGGTATCAGCAGAAGCCCGGACAGGCCCCGAGGCTGCTGATCTAC |
| | | GGCGCTAGCAGAAGGGCTACCGGAATCCCAGACCGGTTCTCCGGCTCC |
| | | GGTTCCGGGACCGATTTCACCCTTACTATCTCGCGCCTGGAACCTGAG |
| | | GACTCCGCCGTCTACTACTGCCAGCAGTACCACTCATCCCCGTCGTGG |
| | | ACGTTCGGACAGGGCACCAAGCTGGAGATTAAGACCACTACCCCAGCA |
| | | CCGAGGCCACCCACCCCGGCTCCTACCATCGCCTCCCAGCCTCTGTCC |
| | | CTGCGTCCGGAGGCATGTAGACCCGCAGCTGGTGGGGCCGTGCATACC |
| | | CGGGGTCTTGACTTCGCCTGCGATATCTACATTTGGGCCCCTCTGGCT |
| | | GGTACTTGCGGGGTCCTGCTGCTTTCACTCGTGATCACTCTTTACTGT |
| | | AAGCGCGGTCGGAAGAAGCTGCTGTACATCTTTAAGCAACCCTTCATG |
| | | AGGCCTGTGCAGACTACTCAAGAGGAGGACGGCTGTTCATGCCGGTTC |
| | | CCAGAGGAGGAGGAAGGCGGCTGCGAACTGCGCGTGAAATTCAGCCGC |
| | | AGCGCAGATGCTCCAGCCTACAAGCAGGGGCAGAACCAGCTCTACAAC |
| | | GAACTCAATCTTGGTCGGAGAGAGGAGTACGACGTGCTGGACAAGCGG |
| | | AGAGGACGGGACCCAGAAATGGGCGGGAAGCCGCGCAGAAAGAATCCC |
| | | CAAGAGGGCCTGTACAACGAGCTCCAAAAGGATAAGATGGCAGAAGCC |
| | | TATAGCGAGATTGGTATGAAAGGGGAACGCAGAAGAGGCAAAGGCCAC |
| | | GACGGACTGTACCAGGGACTCAGCACCGCCACCAAGGACACCTATGAC |
| | | GCTCTTCACATGCAGGCCCTGCCGCCTCGG |

139105

| | | |
|---|---|---|
| 139105-aa | 142 | QVQLVESGGGLVQPGRSLRLSCAASGFTFDDYAMHWVRQAPGKGLEWV |
| ScFv | | SGISWNSGSIGYADSVKGRFTISRDNAKNSLYLQMNSLRAEDTALYYC |
| domain | | SVHSFLAYWGQGTLVTVSSASGGGGSGGRASGGGGSDIVMTQTPLSLP |
| | | VTPGEPASISCRSSQSLLHSNGYNYLDWYLQKPGQSPQLLIYLGSNRA |
| | | SGVPDRFSGSGSGTDFTLKISRVEAEDVGVYYCMQALQTPYTFGQGTK |
| | | VEIK |
| 139105-nt | 143 | CAAGTGCAACTCGTCGAATCCGGTGGAGGTCTGGTCCAACCTGGTAGA |
| ScFv | | AGCCTGAGACTGTCGTGTGCGGCCAGCGGATTCACCTTTGATGACTAT |
| domain | | GCTATGCACTGGGTGCGGCAGGCCCCAGGAAAGGGCCTGGAATGGGTG |
| | | TCGGGAATTAGCTGGAACTCCGGGTCCATTGGCTACGCCGACTCCGTG |
| | | AAGGGCCGCTTCACCATCTCCCGCGACAACGCAAAGAACTCCCTGTAC |
| | | TTGCAAATGAACTCGCTCAGGGCTGAGGATACCGCGCTGTACTACTGC |
| | | TCCGTGCATTCCTTCCTGGCCTACTGGGGACAGGGAACTCTGGTCACC |
| | | GTGTCGAGCGCCTCCGGCGGCGGGGGCTCGGGTGGACGGGCCTCGGGC |
| | | GGAGGGGGGTCCGACATCGTGATGACCCAGACCCCGCTGAGCTTGCCC |
| | | GTGACTCCCGGAGAGCCTGCATCCATCTCCTGCCGGTCATCCCAGTCC |
| | | CTTCTCCACTCCAACGGATACAACTACCTCGACTGGTACCTCCAGAAG |
| | | CCGGGACAGAGCCCTCAGCTTCTGATCTACCTGGGGTCAAATAGAGCC |
| | | TCAGGAGTGCCGGATCGGTTCAGCGGATCTGGTTCGGGAACTGATTTC |
| | | ACTCTGAAGATTTCCCGCGTGGAAGCCGAGGACGTGGGCGTCTACTAC |
| | | TGTATGCAGGCGCTGCAGACCCCCTATACCTTCGGCCAAGGGACGAAA |
| | | GTGGAGATCAAG |
| 139105-aa | 144 | QVQLVESGGGLVQPGRSLRLSCAASGFTFDDYAMHWVRQAPGKGLEWV |
| VH | | SGISWNSGSIGYADSVKGRFTISRDNAKNSLYLQMNSLRAEDTALYYC |
| | | SVHSFLAYWGQGTLVTVSS |
| 139105-aa | 145 | DIVMTQTPLSLPVTPGEPASISCRSSQSLLHSNGYNYLDWYLQKPGQS |
| VL | | PQLLIYLGSNRASGVPDRFSGSGSGTDFTLKISRVEAEDVGVYYCMQA |
| | | LQTPYTFGQGTKVEIK |
| 139105-aa | 146 | MALPVTALLLPLALLLHAARPQVQLVESGGGLVQPGRSLRLSCAASGF |
| Full CAR | | TFDDYAMHWVRQAPGKGLEWVSGISWNSGSIGYADSVKGRFTISRDNA |
| | | KNSLYLQMNSLRAEDTALYYCSVHSFLAYWGQGTLVTVSSASGGGGSG |
| | | GRASGGGGSDIVMTQTPLSLPVTPGEPASISCRSSQSLLHSNGYNYLD |
| | | WYLQKPGQSPQLLIYLGSNRASGVPDRFSGSGSGTDFTLKISRVEAED |
| | | VGVYYCMQALQTPYTFGQGTKVEIKTTTPAPRPPTPAPTIASQPLSLR |
| | | PEACRPAAGGAVHTRGLDFACDIYIWAPLAGTCGVLLLSLVITLYCKR |
| | | GRKKLLYIFKQPFMRPVQTTQEEDGCSCRFPEEEEGGCELRVKFSRSA |
| | | DAPAYKQGQNQLYNELNLGRREEYDVLDKRRGRDPEMGGKPRRKNPQE |
| | | GLYNELQKDKMAEAYSEIGMKGERRRGKGHDGLYQGLSTATKDTYDAL |
| | | HMQALPPR |
| 139105-nt | 147 | ATGGCCCTCCCTGTCACCGCCCTGCTGCTTCCGCTGGCTCTTCTGCTC |
| Full CAR | | CACGCCGCTCGGCCCCAAGTGCAACTCGTCGAATCCGGTGGAGGTCTG |
| | | GTCCAACCTGGTAGAAGCCTGAGACTGTCGTGTGCGGCCAGCGGATTC |
| | | ACCTTTGATGACTATGCTATGCACTGGGTGCGGCAGGCCCCAGGAAAG |
| | | GGCCTGGAATGGGTGTCGGGAATTAGCTGGAACTCCGGGTCCATTGGC |
| | | TACGCCGACTCCGTGAAGGGCCGCTTCACCATCTCCCGCGACAACGCA |
| | | AAGAACTCCCTGTACTTGCAAATGAACTCGCTCAGGGCTGAGGATACC |
| | | GCGCTGTACTACTGCTCCGTGCATTCCTTCCTGGCCTACTGGGGACAG |
| | | GGAACTCTGGTCACCGTGTCGAGCGCCTCCGGCGGCGGGGGCTCGGGT |
| | | GGACGGGCCTCGGGCGGAGGGGGGTCCGACATCGTGATGACCCAGACC |
| | | CCGCTGAGCTTGCCCGTGACTCCCGGAGAGCCTGCATCCATCTCCTGC |
| | | CGGTCATCCCAGTCCCTTCTCCACTCCAACGGATACAACTACCTCGAC |
| | | TGGTACCTCCAGAAGCCGGGACAGAGCCCTCAGCTTCTGATCTACCTG |
| | | GGGTCAAATAGAGCCTCAGGAGTGCCGGATCGGTTCAGCGGATCTGGT |
| | | TCGGGAACTGATTTCACTCTGAAGATTTCCCGCGTGGAAGCCGAGGAC |
| | | GTGGGCGTCTACTACTGTATGCAGGCGCTGCAGACCCCCTATACCTTC |
| | | GGCCAAGGGACGAAAGTGGAGATCAAGACCACTACCCCAGCACCGAGG |
| | | CCACCCACCCCGGCTCCTACCATCGCCTCCCAGCCTCTGTCCCTGCGT |
| | | CCGGAGGCATGTAGACCCGCAGCTGGTGGGGCCGTGCATACCCGGGGT |
| | | CTTGACTTCGCCTGCGATATCTACATTTGGGCCCCTCTGGCTGGTACT |
| | | TGCGGGGTCCTGCTGCTTTCACTCGTGATCACTCTTTACTGTAAGCGC |
| | | GGTCGGAAGAAGCTGCTGTACATCTTTAAGCAACCCTTCATGAGGCCT |
| | | GTGCAGACTACTCAAGAGGAGGACGGCTGTTCATGCCGGTTCCCAGAG |
| | | GAGGAGGAAGGCGGCTGCGAACTGCGCGTGAAATTCAGCCGCAGCGCA |
| | | GATGCTCCAGCCTACAAGCAGGGGCAGAACCAGCTCTACAACGAACTC |
| | | AATCTTGGTCGGAGAGAGGAGTACGACGTGCTGGACAAGCGGAGAGGA |
| | | CGGGACCCAGAAATGGGCGGGAAGCCGCGCAGAAAGAATCCCCAAGAG |
| | | GGCCTGTACAACGAGCTCCAAAAGGATAAGATGGCAGAAGCCTATAGC |
| | | GAGATTGGTATGAAAGGGGAACGCAGAAGAGGCAAAGGCCACGACGGA |
| | | CTGTACCAGGGACTCAGCACCGCCACCAAGGACACCTATGACGCTCTT |
| | | CACATGCAGGCCCTGCCGCCTCGG |

139111

| | | |
|---|---|---|
| 139111-aa | 148 | EVQLLESGGGLVQPGGSLRLSCAVSGFALSNHGMSWVRRAPGKGLEWV |
| ScFv | | SGIVYSGSTYYAASVKGRFTISRDNSRNTLYLQMNSLRPEDTAIYYCS |
| domain | | AHGGESDVWGQGTTVTVSSASGGGGSGGRASGGGGSDIVMTQTPLSLS |
| | | VTPGQPASISCKSSQSLLRNDGKTPLYWYLQKAGQPPQLLIYEVSNRF |
| | | SGVPDRFSGSGSGTDFTLKISRVEAEDVGAYYCMQNIQFPSFGGGTKL |
| | | EIK |
| 139111-nt | 149 | GAAGTGCAATTGTTGGAATCTGGAGGAGGACTTGTGCAGCCTGGAGGA |
| ScFv | | TCACTGAGACTTTCGTGTGCGGTGTCAGGCTTCGCCCTGAGCAACCAC |
| domain | | GGCATGAGCTGGGTGCGGAGAGCCCCGGGGAAGGGTCTGGAATGGGTG |
| | | TCCGGGATCGTCTACTCCGGTTCAACTTACTACGCCGCAAGCGTGAAG |
| | | GGTCGCTTCACCATTTCCCGCGATAACTCCCGGAACACCCTGTACCTC |
| | | CAAATGAACTCCCTGCGGCCCGAGGACACCGCCATCTACTACTGTTCC |
| | | GCGCATGGAGGAGAGTCCGATGTCTGGGGACAGGGCACTACCGTGACC |
| | | GTGTCGAGCGCCTCGGGGGGAGGAGGCTCCGGCGGTCGCGCCTCCGGG |
| | | GGGGGTGGCAGCGACATTGTGATGACGCAGACTCCACTCTCGCTGTCC |
| | | GTGACCCCGGGACAGCCCGCGTCCATCTCGTGCAAGAGCTCCCAGAGC |
| | | CTGCTGAGGAACGACGGAAAGACTCCTCTGTATTGGTACCTCCAGAAG |
| | | GCTGGACAGCCCCCGCAACTGCTCATCTACGAAGTGTCAAATCGCTTC |
| | | TCCGGGGTGCCGGATCGGTTTTCCGGCTCGGGATCGGGCACCGACTTC |
| | | ACCCTGAAAATCTCCAGGGTCGAGGCCGAGGACGTGGGAGCCTACTAC |
| | | TGCATGCAAAACATCCAGTTCCCTTCCTTCGGCGGCGGCACAAAGCTG |
| | | GAGATTAAG |
| 139111-aa | 150 | EVQLLESGGGLVQPGGSLRLSCAVSGFALSNHGMSWVRRAPGKGLEWV |
| VH | | SGIVYSGSTYYAASVKGRFTISRDNSRNTLYLQMNSLRPEDTAIYYCS |
| | | AHGGESDVWGQGTTVTVSS |
| 139111-aa | 151 | DIVMTQTPLSLSVTPGQPASISCKSSQSLLRNDGKTPLYWYLQKAGQP |
| VL | | PQLLIYEVSNRFSGVPDRFSGSGSGTDFTLKISRVEAEDVGAYYCMQN |
| | | IQFPSFGGGTKLEIK |
| 139111-aa | 152 | MALPVTALLLPLALLLHAARPEVQLLESGGGLVQPGGSLRLSCAVSGF |
| Full CAR | | ALSNHGMSWVRRAPGKGLEWVSGIVYSGSTYYAASVKGRFTISRDNSR |
| | | NTLYLQMNSLRPEDTAIYYCSAHGGESDVWGQGTTVTVSSASGGGGSG |
| | | GRASGGGGSDIVMTQTPLSLSVTPGQPASISCKSSQSLLRNDGKTPLY |
| | | WYLQKAGQPPQLLIYEVSNRFSGVPDRFSGSGSGTDFTLKISRVEAED |
| | | VGAYYCMQNIQFPSFGGGTKLEIKTTTPAPRPPTPAPTIASQPLSLRP |
| | | EACRPAAGGAVHTRGLDFACDIYIWAPLAGTCGVLLLSLVITLYCKRG |
| | | RKKLLYIFKQPFMRPVQTTQEEDGCSCRFPEEEEGGCELRVKFSRSAD |
| | | APAYKQGQNQLYNELNLGRREEYDVLDKRRGRDPEMGGKPRRKNPQEG |
| | | LYNELQKDKMAEAYSEIGMKGERRRGKGHDGLYQGLSTATKDTYDALH |
| | | MQALPPR |
| 139111-nt | 153 | ATGGCCCTCCCTGTCACCGCCCTGCTGCTTCCGCTGGCTCTTCTGCTC |
| Full CAR | | CACGCCGCTCGGCCCGAAGTGCAATTGTTGGAATCTGGAGGAGGACTT |
| | | GTGCAGCCTGGAGGATCACTGAGACTTTCGTGTGCGGTGTCAGGCTTC |
| | | GCCCTGAGCAACCACGGCATGAGCTGGGTGCGGAGAGCCCCGGGGAAG |
| | | GGTCTGGAATGGGTGTCCGGGATCGTCTACTCCGGTTCAACTTACTAC |
| | | GCCGCAAGCGTGAAGGGTCGCTTCACCATTTCCCGCGATAACTCCCGG |
| | | AACACCCTGTACCTCCAAATGAACTCCCTGCGGCCCGAGGACACCGCC |
| | | ATCTACTACTGTTCCGCGCATGGAGGAGAGTCCGATGTCTGGGGACAG |
| | | GGCACTACCGTGACCGTGTCGAGCGCCTCGGGGGGAGGAGGCTCCGGC |
| | | GGTCGCGCCTCCGGGGGGGGTGGCAGCGACATTGTGATGACGCAGACT |
| | | CCACTCTCGCTGTCCGTGACCCCGGGACAGCCCGCGTCCATCTCGTGC |
| | | AAGAGCTCCCAGAGCCTGCTGAGGAACGACGGAAAGACTCCTCTGTAT |
| | | TGGTACCTCCAGAAGGCTGGACAGCCCCCGCAACTGCTCATCTACGAA |
| | | GTGTCAAATCGCTTCTCCGGGGTGCCGGATCGGTTTTCCGGCTCGGGA |
| | | TCGGGCACCGACTTCACCCTGAAAATCTCCAGGGTCGAGGCCGAGGAC |
| | | GTGGGAGCCTACTACTGCATGCAAAACATCCAGTTCCCTTCCTTCGGC |
| | | GGCGGCACAAAGCTGGAGATTAAGACCACTACCCCAGCACCGAGGCCA |
| | | CCCACCCCGGCTCCTACCATCGCCTCCCAGCCTCTGTCCCTGCGTCCG |
| | | GAGGCATGTAGACCCGCAGCTGGTGGGGCCGTGCATACCCGGGGTCTT |
| | | GACTTCGCCTGCGATATCTACATTTGGGCCCCTCTGGCTGGTACTTGC |
| | | GGGGTCCTGCTGCTTTCACTCGTGATCACTCTTTACTGTAAGCGCGGT |
| | | CGGAAGAAGCTGCTGTACATCTTTAAGCAACCCTTCATGAGGCCTGTG |
| | | CAGACTACTCAAGAGGAGGACGGCTGTTCATGCCGGTTCCCAGAGGAG |
| | | GAGGAAGGCGGCTGCGAACTGCGCGTGAAATTCAGCCGCAGCGCAGAT |
| | | GCTCCAGCCTACAAGCAGGGGCAGAACCAGCTCTACAACGAACTCAAT |
| | | CTTGGTCGGAGAGAGGAGTACGACGTGCTGGACAAGCGGAGAGGACGG |
| | | GACCCAGAAATGGGCGGGAAGCCGCGCAGAAAGAATCCCCAAGAGGGC |
| | | CTGTACAACGAGCTCCAAAAGGATAAGATGGCAGAAGCCTATAGCGAG |
| | | ATTGGTATGAAAGGGGAACGCAGAAGAGGCAAAGGCCACGACGGACTG |
| | | TACCAGGGACTCAGCACCGCCACCAAGGACACCTATGACGCTCTTCAC |
| | | ATGCAGGCCCTGCCGCCTCGG |

139100

| | | |
|---|---|---|
| 139100-aa | 154 | QVQLVQSGAEVRKTGASVKVSCKASGYIFDNFGINWVRQAPGQGLEWM |
| ScFv | | GWINPKNNNTNYAQKFQGRVTITADESTNTAYMEVSSLRSEDTAVYYC |
| domain | | ARGPYYYQSYMDVWGQGTMVTVSSASGGGGSGGRASGGGGSDIVMTQT |
| | | PLSLPVTPGEPASISCRSSQSLLHSNGYNYLNWYLQKPGQSPQLLIYL |
| | | GSKRASGVPDRFSGSGSGTDFTLHITRVGAEDVGVYYCMQALQTPYTF |
| | | GQGTKLEIK |
| 139100-nt | 155 | CAAGTCCAACTCGTCCAGTCCGGCGCAGAAGTCAGAAAAACCGGTGCT |
| ScFv | | AGCGTGAAAGTGTCCTGCAAGGCCTCCGGCTACATTTTCGATAACTTC |
| domain | | GGAATCAACTGGGTCAGACAGGCCCCGGGCCAGGGGCTGGAATGGATG |
| | | GGATGGATCAACCCCAAGAACAACAACACCAACTACGCACAGAAGTTC |
| | | CAGGGCCGCGTGACTATCACCGCCGATGAATCGACCAATACCGCCTAC |
| | | ATGGAGGTGTCCTCCCTGCGGTCGGAGGACACTGCCGTGTATTACTGC |
| | | GCGAGGGGCCCATACTACTACCAAAGCTACATGGACGTCTGGGGACAG |
| | | GGAACCATGGTGACCGTGTCATCCGCCTCCGGTGGTGGAGGCTCCGGG |
| | | GGGCGGGCTTCAGGAGGCGGAGGAAGCGATATTGTGATGACCCAGACT |
| | | CCGCTTAGCCTGCCCGTGACTCCTGGAGAACCGGCCTCCATTTCCTGC |
| | | CGGTCCTCGCAATCACTCCTGCATTCCAACGGTTACAACTACCTGAAT |
| | | TGGTACCTCCAGAAGCCTGGCCAGTCGCCCCAGTTGCTGATCTATCTG |
| | | GGCTCGAAGCGCGCCTCCGGGGTGCCTGACCGGTTTAGCGGATCTGGG |
| | | AGCGGCACGGACTTCACTCTCCACATCACCCGCGTGGGAGCGGAGGAC |
| | | GTGGGAGTGTACTACTGTATGCAGGCGCTGCAGACTCCGTACACATTC |
| | | GGACAGGGCACCAAGCTGGAGATCAAG |
| 139100-aa | 156 | QVQLVQSGAEVRKTGASVKVSCKASGYIFDNFGINWVRQAPGQGLEWM |
| VH | | GWINPKNNNTNYAQKFQGRVTITADESTNTAYMEVSSLRSEDTAVYYC |
| | | ARGPYYYQSYMDVWGQGTMVTVSS |
| 139100-aa | 157 | DIVMTQTPLSLPVTPGEPASISCRSSQSLLHSNGYNYLNWYLQKPGQS |
| VL | | PQLLIYLGSKRASGVPDRFSGSGSGTDFTLHITRVGAEDVGVYYCMQA |
| | | LQTPYTFGQGTKLEIK |
| 139100-aa | 158 | MALPVTALLLPLALLLHAARPQVQLVQSGAEVRKTGASVKVSCKASGY |
| Full CAR | | IFDNFGINWVRQAPGQGLEWMGWINPKNNNTNYAQKFQGRVTITADES |
| | | TNTAYMEVSSLRSEDTAVYYCARGPYYYQSYMDVWGQGTMVTVSSASG |
| | | GGGSGGRASGGGGSDIVMTQTPLSLPVTPGEPASISCRSSQSLLHSNG |
| | | YNYLNWYLQKPGQSPQLLIYLGSKRASGVPDRFSGSGSGTDFTLHITR |
| | | VGAEDVGVYYCMQALQTPYTFGQGTKLEIKTTTPAPRPPTPAPTIASQ |
| | | PLSLRPEACRPAAGGAVHTRGLDFACDIYIWAPLAGTCGVLLLSLVIT |
| | | LYCKRGRKKLLYIFKQPFMRPVQTTQEEDGCSCRFPEEEEGGCELRVK |
| | | FSRSADAPAYKQGQNQLYNELNLGRREEYDVLDKRRGRDPEMGGKPRR |
| | | KNPQEGLYNELQKDKMAEAYSEIGMKGERRRGKGHDGLYQGLSTATKD |
| | | TYDALHMQALPPR |
| 139100-nt | 159 | ATGGCCCTCCCTGTCACCGCCCTGCTGCTTCCGCTGGCTCTTCTGCTC |
| Full CAR | | CACGCCGCTCGGCCCCAAGTCCAACTCGTCCAGTCCGGCGCAGAAGTC |
| | | AGAAAAACCGGTGCTAGCGTGAAAGTGTCCTGCAAGGCCTCCGGCTAC |
| | | ATTTTCGATAACTTCGGAATCAACTGGGTCAGACAGGCCCCGGGCCAG |
| | | GGGCTGGAATGGATGGGATGGATCAACCCCAAGAACAACAACACCAAC |
| | | TACGCACAGAAGTTCCAGGGCCGCGTGACTATCACCGCCGATGAATCG |
| | | ACCAATACCGCCTACATGGAGGTGTCCTCCCTGCGGTCGGAGGACACT |
| | | GCCGTGTATTACTGCGCGAGGGGCCCATACTACTACCAAAGCTACATG |
| | | GACGTCTGGGGACAGGGAACCATGGTGACCGTGTCATCCGCCTCCGGT |
| | | GGTGGAGGCTCCGGGGGGCGGGCTTCAGGAGGCGGAGGAAGCGATATT |
| | | GTGATGACCCAGACTCCGCTTAGCCTGCCCGTGACTCCTGGAGAACCG |
| | | GCCTCCATTTCCTGCCGGTCCTCGCAATCACTCCTGCATTCCAACGGT |
| | | TACAACTACCTGAATTGGTACCTCCAGAAGCCTGGCCAGTCGCCCCAG |
| | | TTGCTGATCTATCTGGGCTCGAAGCGCGCCTCCGGGGTGCCTGACCGG |
| | | TTTAGCGGATCTGGGAGCGGCACGGACTTCACTCTCCACATCACCCGC |
| | | GTGGGAGCGGAGGACGTGGGAGTGTACTACTGTATGCAGGCGCTGCAG |
| | | ACTCCGTACACATTCGGACAGGGCACCAAGCTGGAGATCAAGACCACT |
| | | ACCCCAGCACCGAGGCCACCCACCCCGGCTCCTACCATCGCCTCCCAG |
| | | CCTCTGTCCCTGCGTCCGGAGGCATGTAGACCCGCAGCTGGTGGGGCC |
| | | GTGCATACCCGGGGTCTTGACTTCGCCTGCGATATCTACATTTGGGCC |
| | | CCTCTGGCTGGTACTTGCGGGGTCCTGCTGCTTTCACTCGTGATCACT |
| | | CTTTACTGTAAGCGCGGTCGGAAGAAGCTGCTGTACATCTTTAAGCAA |
| | | CCCTTCATGAGGCCTGTGCAGACTACTCAAGAGGAGGACGGCTGTTCA |
| | | TGCCGGTTCCCAGAGGAGGAGGAAGGCGGCTGCGAACTGCGCGTGAAA |
| | | TTCAGCCGCAGCGCAGATGCTCCAGCCTACAAGCAGGGGCAGAACCAG |
| | | CTCTACAACGAACTCAATCTTGGTCGGAGAGAGGAGTACGACGTGCTG |
| | | GACAAGCGGAGAGGACGGGACCCAGAAATGGGCGGGAAGCCGCGCAGA |
| | | AAGAATCCCCAAGAGGGCCTGTACAACGAGCTCCAAAAGGATAAGATG |
| | | GCAGAAGCCTATAGCGAGATTGGTATGAAAGGGGAACGCAGAAGAGGC |
| | | AAAGGCCACGACGGACTGTACCAGGGACTCAGCACCGCCACCAAGGAC |
| | | ACCTATGACGCTCTTCACATGCAGGCCCTGCCGCCTCGG |

139101

| | | |
|---|---|---|
| 139101-aa | 160 | QVQLQESGGGLVQPGGSLRLSCAASGFTFSSDAMTWVRQAPGKGLEWV |
| ScFv | | SVISGSGGTTYYADSVKGRFTISRDNSKNTLYLQMNSLRAEDTAVYYC |
| domain | | AKLDSSGYYYARGPRYWGQGTLVTVSSASGGGGSGGRASGGGGSDIQL |
| | | TQSPSSLSASVGDRVTITCRASQSISSYLNWYQQKPGKAPKLLIYGAS |
| | | TLASGVPARFSGSGSGTHFTLTINSLQSEDSATYYCQQSYKRASFGQG |
| | | TKVEIK |
| 139101-nt | 161 | CAAGTGCAACTTCAAGAATCAGGCGGAGGACTCGTGCAGCCCGGAGGA |
| ScFv | | TCATTGCGGCTCTCGTGCGCCGCCTCGGGCTTCACCTTCTCGAGCGAC |
| domain | | GCCATGACCTGGGTCCGCCAGGCCCCGGGGAAGGGGCTGGAATGGGTG |
| | | TCTGTGATTTCCGGCTCCGGGGGAACTACGTACTACGCCGATTCCGTG |
| | | AAAGGTCGCTTCACTATCTCCCGGGACAACAGCAAGAACACCCTTTAT |
| | | CTGCAAATGAATTCCCTCCGCGCCGAGGACACCGCCGTGTACTACTGC |
| | | GCCAAGCTGGACTCCTCGGGCTACTACTATGCCCGGGGTCCGAGATAC |
| | | TGGGGACAGGGAACCCTCGTGACCGTGTCCTCCGCGTCCGGCGGAGGA |
| | | GGGTCGGGAGGGCGGGCCTCCGGCGGCGGCGGTTCGGACATCCAGCTG |
| | | ACCCAGTCCCCATCCTCACTGAGCGCAAGCGTGGGCGACAGAGTCACC |
| | | ATTACATGCAGGGCGTCCCAGAGCATCAGCTCCTACCTGAACTGGTAC |
| | | CAACAGAAGCCTGGAAAGGCTCCTAAGCTGTTGATCTACGGGGCTTCG |
| | | ACCCTGGCATCCGGGGTGCCCGCGAGGTTTAGCGGAAGCGGTAGCGGC |
| | | ACTCACTTCACTCTGACCATTAACAGCCTCCAGTCCGAGGATTCAGCC |
| | | ACTTACTACTGTCAGCAGTCCTACAAGCGGGCCAGCTTCGGACAGGGC |
| | | ACTAAGGTCGAGATCAAG |
| 139101-aa | 162 | QVQLQESGGGLVQPGGSLRLSCAASGFTFSSDAMTWVRQAPGKGLEWV |
| VH | | SVISGSGGTTYYADSVKGRFTISRDNSKNTLYLQMNSLRAEDTAVYYC |
| | | AKLDSSGYYYARGPRYWGQGTLVTVSS |
| 139101-aa | 163 | DIQLTQSPSSLSASVGDRVTITCRASQSISSYLNWYQQKPGKAPKLLI |
| VL | | YGASTLASGVPARFSGSGSGTHFTLTINSLQSEDSATYYCQQSYKRAS |
| | | FGQGTKVEIK |
| 139101-aa | 164 | MALPVTALLLPLALLLHAARPQVQLQESGGGLVQPGGSLRLSCAASGF |
| Full CAR | | TFSSDAMTWVRQAPGKGLEWVSVISGSGGTTYYADSVKGRFTISRDNS |
| | | KNTLYLQMNSLRAEDTAVYYCAKLDSSGYYYARGPRYWGQGTLVTVSS |
| | | ASGGGGSGGRASGGGGSDIQLTQSPSSLSASVGDRVTITCRASQSISS |
| | | YLNWYQQKPGKAPKLLIYGASTLASGVPARFSGSGSGTHFTLTINSLQ |
| | | SEDSATYYCQQSYKRASFGQGTKVEIKTTTPAPRPPTPAPTIASQPLS |
| | | LRPEACRPAAGGAVHTRGLDFACDIYIWAPLAGTCGVLLLSLVITLYC |
| | | KRGRKKLLYIFKQPFMRPVQTTQEEDGCSCRFPEEEEGGCELRVKFSR |
| | | SADAPAYKQGQNQLYNELNLGRREEYDVLDKRRGRDPEMGGKPRRKNP |
| | | QEGLYNELQKDKMAEAYSEIGMKGERRRGKGHDGLYQGLSTATKDTYD |
| | | ALHMQALPPR |
| 139101-nt | 165 | ATGGCCCTCCCTGTCACCGCCCTGCTGCTTCCGCTGGCTCTTCTGCTC |
| Full CAR | | CACGCCGCTCGGCCCCAAGTGCAACTTCAAGAATCAGGCGGAGGACTC |
| | | GTGCAGCCCGGAGGATCATTGCGGCTCTCGTGCGCCGCCTCGGGCTTC |
| | | ACCTTCTCGAGCGACGCCATGACCTGGGTCCGCCAGGCCCCGGGGAAG |
| | | GGGCTGGAATGGGTGTCTGTGATTTCCGGCTCCGGGGGAACTACGTAC |
| | | TACGCCGATTCCGTGAAAGGTCGCTTCACTATCTCCCGGGACAACAGC |
| | | AAGAACACCCTTTATCTGCAAATGAATTCCCTCCGCGCCGAGGACACC |
| | | GCCGTGTACTACTGCGCCAAGCTGGACTCCTCGGGCTACTACTATGCC |
| | | CGGGGTCCGAGATACTGGGGACAGGGAACCCTCGTGACCGTGTCCTCC |
| | | GCGTCCGGCGGAGGAGGGTCGGGAGGGCGGGCCTCCGGCGGCGGCGGT |
| | | TCGGACATCCAGCTGACCCAGTCCCCATCCTCACTGAGCGCAAGCGTG |
| | | GGCGACAGAGTCACCATTACATGCAGGGCGTCCCAGAGCATCAGCTCC |
| | | TACCTGAACTGGTACCAACAGAAGCCTGGAAAGGCTCCTAAGCTGTTG |
| | | ATCTACGGGGCTTCGACCCTGGCATCCGGGGTGCCCGCGAGGTTTAGC |
| | | GGAAGCGGTAGCGGCACTCACTTCACTCTGACCATTAACAGCCTCCAG |
| | | TCCGAGGATTCAGCCACTTACTACTGTCAGCAGTCCTACAAGCGGGCC |
| | | AGCTTCGGACAGGGCACTAAGGTCGAGATCAAGACCACTACCCCAGCA |
| | | CCGAGGCCACCCACCCCGGCTCCTACCATCGCCTCCCAGCCTCTGTCC |
| | | CTGCGTCCGGAGGCATGTAGACCCGCAGCTGGTGGGGCCGTGCATACC |
| | | CGGGGTCTTGACTTCGCCTGCGATATCTACATTTGGGCCCCTCTGGCT |
| | | GGTACTTGCGGGGTCCTGCTGCTTTCACTCGTGATCACTCTTTACTGT |
| | | AAGCGCGGTCGGAAGAAGCTGCTGTACATCTTTAAGCAACCCTTCATG |
| | | AGGCCTGTGCAGACTACTCAAGAGGAGGACGGCTGTTCATGCCGGTTC |
| | | CCAGAGGAGGAGGAAGGCGGCTGCGAACTGCGCGTGAAATTCAGCCGC |
| | | AGCGCAGATGCTCCAGCCTACAAGCAGGGGCAGAACCAGCTCTACAAC |
| | | GAACTCAATCTTGGTCGGAGAGAGGAGTACGACGTGCTGGACAAGCGG |
| | | AGAGGACGGGACCCAGAAATGGGCGGGAAGCCGCGCAGAAAGAATCCC |
| | | CAAGAGGGCCTGTACAACGAGCTCCAAAAGGATAAGATGGCAGAAGCC |
| | | TATAGCGAGATTGGTATGAAAGGGGAACGCAGAAGAGGCAAAGGCCAC |
| | | GACGGACTGTACCAGGGACTCAGCACCGCCACCAAGGACACCTATGAC |
| | | GCTCTTCACATGCAGGCCCTGCCGCCTCGG |

139102

| | | |
|---|---|---|
| 139102-aa | 166 | QVQLVQSGAEVKKPGASVKVSCKASGYTFSNYGITWVRQAPGQGLEWM |
| ScFv | | GWISAYNGNTNYAQKFQGRVTMTRNTSISTAYMELSSLRSEDTAVYYC |
| domain | | ARGPYYYYMDVWGKGTMVTVSSASGGGGSGGRASGGGGSEIVMTQSPL |
| | | SLPVTPGEPASISCRSSQSLLYSNGYNYVDWYLQKPGQSPQLLIYLGS |
| | | NRASGVPDRFSGSGSGTDFKLQISRVEAEDVGIYYCMQGRQFPYSFGQ |
| | | GTKVEIK |
| 139102-nt | 167 | CAAGTCCAACTGGTCCAGAGCGGTGCAGAAGTGAAGAAGCCCGGAGCG |
| ScFv | | AGCGTGAAAGTGTCCTGCAAGGCTTCCGGGTACACCTTCTCCAACTAC |
| domain | | GGCATCACTTGGGTGCGCCAGGCCCCGGGACAGGGCCTGGAATGGATG |
| | | GGGTGGATTTCCGCGTACAACGGCAATACGAACTACGCTCAGAAGTTC |
| | | CAGGGTAGAGTGACCATGACTAGGAACACCTCCATTTCCACCGCCTAC |
| | | ATGGAACTGTCCTCCCTGCGGAGCGAGGACACCGCCGTGTACTATTGC |
| | | GCCCGGGGACCATACTACTACTACATGGATGTCTGGGGGAAGGGGACT |
| | | ATGGTCACCGTGTCATCCGCCTCGGGAGGCGGCGGATCAGGAGGACGC |
| | | GCCTCTGGTGGTGGAGGATCGGAGATCGTGATGACCCAGAGCCCTCTC |
| | | TCCTTGCCCGTGACTCCTGGGGAGCCCGCATCCATTTCATGCCGGAGC |
| | | TCCCAGTCACTTCTCTACTCCAACGGCTATAACTACGTGGATTGGTAC |
| | | CTCCAAAAGCCGGGCCAGAGCCCGCAGCTGCTGATCTACCTGGGCTCG |
| | | AACAGGGCCAGCGGAGTGCCTGACCGGTTCTCCGGGTCGGGAAGCGGG |
| | | ACCGACTTCAAGCTGCAAATCTCGAGAGTGGAGGCCGAGGACGTGGGA |
| | | ATCTACTACTGTATGCAGGGCCGCCAGTTTCCGTACTCGTTCGGACAG |
| | | GGCACCAAAGTGGAAATCAAG |
| 139102-aa | 168 | QVQLVQSGAEVKKPGASVKVSCKASGYTFSNYGITWVRQAPGQGLEWM |
| VH | | GWISAYNGNTNYAQKFQGRVTMTRNTSISTAYMELSSLRSEDTAVYYC |
| | | ARGPYYYYMDVWGKGTMVTVSS |
| 139102-aa | 169 | EIVMTQSPLSLPVTPGEPASISCRSSQSLLYSNGYNYVDWYLQKPGQS |
| VL | | PQLLIYLGSNRASGVPDRFSGSGSGTDFKLQISRVEAEDVGIYYCMQG |
| | | RQFPYSFGQGTKVEIK |
| 139102-aa | 170 | MALPVTALLLPLALLLHAARPQVQLVQSGAEVKKPGASVKVSCKASGY |
| Full CAR | | TFSNYGITWVRQAPGQGLEWMGWISAYNGNTNYAQKFQGRVTMTRNTS |
| | | ISTAYMELSSLRSEDTAVYYCARGPYYYYMDVWGKGTMVTVSSASGGG |
| | | GSGGRASGGGGSEIVMTQSPLSLPVTPGEPASISCRSSQSLLYSNGYN |
| | | YVDWYLQKPGQSPQLLIYLGSNRASGVPDRFSGSGSGTDFKLQISRVE |
| | | AEDVGIYYCMQGRQFPYSFGQGTKVEIKTTTPAPRPPTPAPTIASQPL |
| | | SLRPEACRPAAGGAVHTRGLDFACDIYIWAPLAGTCGVLLLSLVITLY |
| | | CKRGRKKLLYIFKQPFMRPVQTTQEEDGCSCRFPEEEEGGCELRVKFS |
| | | RSADAPAYKQGQNQLYNELNLGRREEYDVLDKRRGRDPEMGGKPRRKN |
| | | PQEGLYNELQKDKMAEAYSEIGMKGERRRGKGHDGLYQGLSTATKDTY |
| | | DALHMQALPPR |
| 139102-nt | 171 | ATGGCCCTCCCTGTCACCGCCCTGCTGCTTCCGCTGGCTCTTCTGCTC |
| Full CAR | | CACGCCGCTCGGCCCCAAGTCCAACTGGTCCAGAGCGGTGCAGAAGTG |
| | | AAGAAGCCCGGAGCGAGCGTGAAAGTGTCCTGCAAGGCTTCCGGGTAC |
| | | ACCTTCTCCAACTACGGCATCACTTGGGTGCGCCAGGCCCCGGGACAG |
| | | GGCCTGGAATGGATGGGGTGGATTTCCGCGTACAACGGCAATACGAAC |
| | | TACGCTCAGAAGTTCCAGGGTAGAGTGACCATGACTAGGAACACCTCC |
| | | ATTTCCACCGCCTACATGGAACTGTCCTCCCTGCGGAGCGAGGACACC |
| | | GCCGTGTACTATTGCGCCCGGGGACCATACTACTACTACATGGATGTC |
| | | TGGGGGAAGGGGACTATGGTCACCGTGTCATCCGCCTCGGGAGGCGGC |
| | | GGATCAGGAGGACGCGCCTCTGGTGGTGGAGGATCGGAGATCGTGATG |
| | | ACCCAGAGCCCTCTCTCCTTGCCCGTGACTCCTGGGGAGCCCGCATCC |
| | | ATTTCATGCCGGAGCTCCCAGTCACTTCTCTACTCCAACGGCTATAAC |
| | | TACGTGGATTGGTACCTCCAAAAGCCGGGCCAGAGCCCGCAGCTGCTG |
| | | ATCTACCTGGGCTCGAACAGGGCCAGCGGAGTGCCTGACCGGTTCTCC |
| | | GGGTCGGGAAGCGGGACCGACTTCAAGCTGCAAATCTCGAGAGTGGAG |
| | | GCCGAGGACGTGGGAATCTACTACTGTATGCAGGGCCGCCAGTTTCCG |
| | | TACTCGTTCGGACAGGGCACCAAAGTGGAAATCAAGACCACTACCCCA |
| | | GCACCGAGGCCACCCACCCCGGCTCCTACCATCGCCTCCCAGCCTCTG |
| | | TCCCTGCGTCCGGAGGCATGTAGACCCGCAGCTGGTGGGGCCGTGCAT |
| | | ACCCGGGGTCTTGACTTCGCCTGCGATATCTACATTTGGGCCCCTCTG |
| | | GCTGGTACTTGCGGGGTCCTGCTGCTTTCACTCGTGATCACTCTTTAC |
| | | TGTAAGCGCGGTCGGAAGAAGCTGCTGTACATCTTTAAGCAACCCTTC |
| | | ATGAGGCCTGTGCAGACTACTCAAGAGGAGGACGGCTGTTCATGCCGG |
| | | TTCCCAGAGGAGGAGGAAGGCGGCTGCGAACTGCGCGTGAAATTCAGC |
| | | CGCAGCGCAGATGCTCCAGCCTACAAGCAGGGGCAGAACCAGCTCTAC |
| | | AACGAACTCAATCTTGGTCGGAGAGAGGAGTACGACGTGCTGGACAAG |
| | | CGGAGAGGACGGGACCCAGAAATGGGCGGGAAGCCGCGCAGAAAGAAT |
| | | CCCCAAGAGGGCCTGTACAACGAGCTCCAAAAGGATAAGATGGCAGAA |
| | | GCCTATAGCGAGATTGGTATGAAAGGGGAACGCAGAAGAGGCAAAGGC |
| | | CACGACGGACTGTACCAGGGACTCAGCACCGCCACCAAGGACACCTAT |
| | | GACGCTCTTCACATGCAGGCCCTGCCGCCTCGG |

139104

| | | |
|---|---|---|
| 139104-aa | 172 | EVQLLETGGGLVQPGGSLRLSCAVSGFALSNHGMSWVRRAPGKGLEWV |
| ScFv | | SGIVYSGSTYYAASVKGRFTISRDNSRNTLYLQMNSLRPEDTAIYYCS |
| domain | | AHGGESDVWGQGTTVTVSSASGGGGSGGRASGGGGSEIVLTQSPATLS |
| | | VSPGESATLSCRASQSVSSNLAWYQQKPGQAPRLLIYGASTRASGIPD |
| | | RFSGSGSGTDFTLTISSLQAEDVAVYYCQQYGSSLTFGGGTKVEIK |
| 139104-nt | 173 | GAAGTGCAATTGCTCGAAACTGGAGGAGGTCTGGTGCAACCTGGAGGA |
| ScFv | | TCACTTCGCCTGTCCTGCGCCGTGTCGGGCTTTGCCCTGTCCAACCAT |
| domain | | GGAATGAGCTGGGTCCGCCGCGCGCCGGGGAAGGGCCTCGAATGGGTG |
| | | TCCGGCATCGTCTACTCCGGCTCCACCTACTACGCCGCGTCCGTGAAG |
| | | GGCCGGTTCACGATTTCACGGGACAACTCGCGGAACACCCTGTACCTC |
| | | CAAATGAATTCCCTTCGGCCGGAGGATACTGCCATCTACTACTGCTCC |
| | | GCCCACGGTGGCGAATCCGACGTCTGGGGCCAGGGAACCACCGTGACC |
| | | GTGTCCAGCGCGTCCGGGGGAGGAGGAAGCGGGGGTAGAGCATCGGGT |
| | | GGAGGCGGATCAGAGATCGTGCTGACCCAGTCCCCCGCCACCTTGAGC |
| | | GTGTCACCAGGAGAGTCCGCCACCCTGTCATGCCGCGCCAGCCAGTCC |
| | | GTGTCCTCCAACCTGGCTTGGTACCAGCAGAAGCCGGGGCAGGCCCCT |
| | | AGACTCCTGATCTATGGGGCGTCGACCCGGGCATCTGGAATTCCCGAT |
| | | AGGTTCAGCGGATCGGGCTCGGGCACTGACTTCACTCTGACCATCTCC |
| | | TCGCTGCAAGCCGAGGACGTGGCTGTGTACTACTGTCAGCAGTACGGA |
| | | AGCTCCCTGACTTTCGGTGGCGGGACCAAAGTCGAGATTAAG |
| 139104-aa | 174 | EVQLLETGGGLVQPGGSLRLSCAVSGFALSNHGMSWVRRAPGKGLEWV |
| VH | | SGIVYSGSTYYAASVKGRFTISRDNSRNTLYLQMNSLRPEDTAIYYCS |
| | | AHGGESDVWGQGTTVTVSS |
| 139104-aa | 175 | EIVLTQSPATLSVSPGESATLSCRASQSVSSNLAWYQQKPGQAPRLLI |
| VL | | YGASTRASGIPDRFSGSGSGTDFTLTISSLQAEDVAVYYCQQYGSSLT |
| | | FGGGTKVEIK |
| 139104-aa | 176 | MALPVTALLLPLALLLHAARPEVQLLETGGGLVQPGGSLRLSCAVSGF |
| Full CAR | | ALSNHGMSWVRRAPGKGLEWVSGIVYSGSTYYAASVKGRFTISRDNSR |
| | | NTLYLQMNSLRPEDTAIYYCSAHGGESDVWGQGTTVTVSSASGGGGSG |
| | | GRASGGGGSEIVLTQSPATLSVSPGESATLSCRASQSVSSNLAWYQQK |
| | | PGQAPRLLIYGASTRASGIPDRFSGSGSGTDFTLTISSLQAEDVAVYY |
| | | CQQYGSSLTFGGGTKVEIKTTTPAPRPPTPAPTIASQPLSLRPEACRP |
| | | AAGGAVHTRGLDFACDIYIWAPLAGTCGVLLLSLVITLYCKRGRKKLL |
| | | YIFKQPFMRPVQTTQEEDGCSCRFPEEEEGGCELRVKFSRSADAPAYK |
| | | QGQNQLYNELNLGRREEYDVLDKRRGRDPEMGGKPRRKNPQEGLYNEL |
| | | QKDKMAEAYSEIGMKGERRRGKGHDGLYQGLSTATKDTYDALHMQALP |
| | | PR |
| 139104-nt | 177 | ATGGCCCTCCCTGTCACCGCCCTGCTGCTTCCGCTGGCTCTTCTGCTC |
| Full CAR | | CACGCCGCTCGGCCCGAAGTGCAATTGCTCGAAACTGGAGGAGGTCTG |
| | | GTGCAACCTGGAGGATCACTTCGCCTGTCCTGCGCCGTGTCGGGCTTT |
| | | GCCCTGTCCAACCATGGAATGAGCTGGGTCCGCCGCGCGCCGGGGAAG |
| | | GGCCTCGAATGGGTGTCCGGCATCGTCTACTCCGGCTCCACCTACTAC |
| | | GCCGCGTCCGTGAAGGGCCGGTTCACGATTTCACGGGACAACTCGCGG |
| | | AACACCCTGTACCTCCAAATGAATTCCCTTCGGCCGGAGGATACTGCC |
| | | ATCTACTACTGCTCCGCCCACGGTGGCGAATCCGACGTCTGGGGCCAG |
| | | GGAACCACCGTGACCGTGTCCAGCGCGTCCGGGGGAGGAGGAAGCGGG |
| | | GGTAGAGCATCGGGTGGAGGCGGATCAGAGATCGTGCTGACCCAGTCC |
| | | CCCGCCACCTTGAGCGTGTCACCAGGAGAGTCCGCCACCCTGTCATGC |
| | | CGCGCCAGCCAGTCCGTGTCCTCCAACCTGGCTTGGTACCAGCAGAAG |
| | | CCGGGGCAGGCCCCTAGACTCCTGATCTATGGGGCGTCGACCCGGGCA |
| | | TCTGGAATTCCCGATAGGTTCAGCGGATCGGGCTCGGGCACTGACTTC |
| | | ACTCTGACCATCTCCTCGCTGCAAGCCGAGGACGTGGCTGTGTACTAC |
| | | TGTCAGCAGTACGGAAGCTCCCTGACTTTCGGTGGCGGGACCAAAGTC |
| | | GAGATTAAGACCACTACCCCAGCACCGAGGCCACCCACCCCGGCTCCT |
| | | ACCATCGCCTCCCAGCCTCTGTCCCTGCGTCCGGAGGCATGTAGACCC |
| | | GCAGCTGGTGGGGCCGTGCATACCCGGGGTCTTGACTTCGCCTGCGAT |
| | | ATCTACATTTGGGCCCCTCTGGCTGGTACTTGCGGGGTCCTGCTGCTT |
| | | TCACTCGTGATCACTCTTTACTGTAAGCGCGGTCGGAAGAAGCTGCTG |
| | | TACATCTTTAAGCAACCCTTCATGAGGCCTGTGCAGACTACTCAAGAG |
| | | GAGGACGGCTGTTCATGCCGGTTCCCAGAGGAGGAGGAAGGCGGCTGC |
| | | GAACTGCGCGTGAAATTCAGCCGCAGCGCAGATGCTCCAGCCTACAAG |
| | | CAGGGGCAGAACCAGCTCTACAACGAACTCAATCTTGGTCGGAGAGAG |
| | | GAGTACGACGTGCTGGACAAGCGGAGAGGACGGGACCCAGAAATGGGC |
| | | GGGAAGCCGCGCAGAAAGAATCCCCAAGAGGGCCTGTACAACGAGCTC |
| | | CAAAAGGATAAGATGGCAGAAGCCTATAGCGAGATTGGTATGAAAGGG |
| | | GAACGCAGAAGAGGCAAAGGCCACGACGGACTGTACCAGGGACTCAGC |
| | | ACCGCCACCAAGGACACCTATGACGCTCTTCACATGCAGGCCCTGCCG |
| | | CCTCGG |

139106

| | | |
|---|---|---|
| 139106-aa | 178 | EVQLVETGGGLVQPGGSLRLSCAVSGFALSNHGMSWVRRAPGKGLEWV |
| ScFv | | SGIVYSGSTYYAASVKGRFTISRDNSRNTLYLQMNSLRPEDTAIYYCS |
| domain | | AHGGESDVWGQGTTVTVSSASGGGGSGGRASGGGGSEIVMTQSPATLS |
| | | VSPGERATLSCRASQSVSSKLAWYQQKPGQAPRLLMYGASIRATGIPD |
| | | RFSGSGSGTEFTLTISSLEPEDFAVYYCQQYGSSSWTFGQGTKVEIK |
| 139106-nt | 179 | GAAGTGCAATTGGTGGAAACTGGAGGAGGACTTGTGCAACCTGGAGGA |
| ScFv | | TCATTGAGACTGAGCTGCGCAGTGTCGGGATTCGCCCTGAGCAACCAT |
| domain | | GGAATGTCCTGGGTCAGAAGGGCCCCTGGAAAAGGCCTCGAATGGGTG |
| | | TCAGGGATCGTGTACTCCGGTTCCACTTACTACGCCGCCTCCGTGAAG |
| | | GGGCGCTTCACTATCTCACGGGATAACTCCCGCAATACCCTGTACCTC |
| | | CAAATGAACAGCCTGCGGCCGGAGGATACCGCCATCTACTACTGTTCC |
| | | GCCCACGGTGGAGAGTCTGACGTCTGGGGCCAGGGAACTACCGTGACC |
| | | GTGTCCTCCGCGTCCGGCGGTGGAGGGAGCGGCGGCCGCGCCAGCGGC |
| | | GGCGGAGGCTCCGAGATCGTGATGACCCAGAGCCCCGCTACTCTGTCG |
| | | GTGTCGCCCGGAGAAAGGGCGACCCTGTCCTGCCGGGCGTCGCAGTCC |
| | | GTGAGCAGCAAGCTGGCTTGGTACCAGCAGAAGCCGGGCCAGGCACCA |
| | | CGCCTGCTTATGTACGGTGCCTCCATTCGGGCCACCGGAATCCCGGAC |
| | | CGGTTCTCGGGGTCGGGGTCCGGTACCGAGTTCACACTGACCATTTCC |
| | | TCGCTCGAGCCCGAGGACTTTGCCGTCTATTACTGCCAGCAGTACGGC |
| | | TCCTCCTCATGGACGTTCGGCCAGGGGACCAAGGTCGAAATCAAG |
| 139106-aa | 180 | EVQLVETGGGLVQPGGSLRLSCAVSGFALSNHGMSWVRRAPGKGLEWV |
| VH | | SGIVYSGSTYYAASVKGRFTISRDNSRNTLYLQMNSLRPEDTAIYYCS |
| | | AHGGESDVWGQGTTVTVSS |
| 139106-aa | 181 | EIVMTQSPATLSVSPGERATLSCRASQSVSSKLAWYQQKPGQAPRLLM |
| VL | | YGASIRATGIPDRFSGSGSGTEFTLTISSLEPEDFAVYYCQQYGSSSW |
| | | TFGQGTKVEIK |
| 139106-aa | 182 | MALPVTALLLPLALLLHAARPEVQLVETGGGLVQPGGSLRLSCAVSGF |
| Full CAR | | ALSNHGMSWVRRAPGKGLEWVSGIVYSGSTYYAASVKGRFTISRDNSR |
| | | NTLYLQMNSLRPEDTAIYYCSAHGGESDVWGQGTTVTVSSASGGGGSG |
| | | GRASGGGGSEIVMTQSPATLSVSPGERATLSCRASQSVSSKLAWYQQK |
| | | PGQAPRLLMYGASIRATGIPDRFSGSGSGTEFTLTISSLEPEDFAVYY |
| | | CQQYGSSSWTFGQGTKVEIKTTTPAPRPPTPAPTIASQPLSLRPEACR |
| | | PAAGGAVHTRGLDFACDIYIWAPLAGTCGVLLLSLVITLYCKRGRKKL |
| | | LYIFKQPFMRPVQTTQEEDGCSCRFPEEEEGGCELRVKFSRSADAPAY |
| | | KQGQNQLYNELNLGRREEYDVLDKRRGRDPEMGGKPRRKNPQEGLYNE |
| | | LQKDKMAEAYSEIGMKGERRRGKGHDGLYQGLSTATKDTYDALHMQAL |
| | | PPR |
| 139106-nt | 183 | ATGGCCCTCCCTGTCACCGCCCTGCTGCTTCCGCTGGCTCTTCTGCTC |
| Full CAR | | CACGCCGCTCGGCCCGAAGTGCAATTGGTGGAAACTGGAGGAGGACTT |
| | | GTGCAACCTGGAGGATCATTGAGACTGAGCTGCGCAGTGTCGGGATTC |
| | | GCCCTGAGCAACCATGGAATGTCCTGGGTCAGAAGGGCCCCTGGAAAA |
| | | GGCCTCGAATGGGTGTCAGGGATCGTGTACTCCGGTTCCACTTACTAC |
| | | GCCGCCTCCGTGAAGGGGCGCTTCACTATCTCACGGGATAACTCCCGC |
| | | AATACCCTGTACCTCCAAATGAACAGCCTGCGGCCGGAGGATACCGCC |
| | | ATCTACTACTGTTCCGCCCACGGTGGAGAGTCTGACGTCTGGGGCCAG |
| | | GGAACTACCGTGACCGTGTCCTCCGCGTCCGGCGGTGGAGGGAGCGGC |
| | | GGCCGCGCCAGCGGCGGCGGAGGCTCCGAGATCGTGATGACCCAGAGC |
| | | CCCGCTACTCTGTCGGTGTCGCCCGGAGAAAGGGCGACCCTGTCCTGC |
| | | CGGGCGTCGCAGTCCGTGAGCAGCAAGCTGGCTTGGTACCAGCAGAAG |
| | | CCGGGCCAGGCACCACGCCTGCTTATGTACGGTGCCTCCATTCGGGCC |
| | | ACCGGAATCCCGGACCGGTTCTCGGGGTCGGGGTCCGGTACCGAGTTC |
| | | ACACTGACCATTTCCTCGCTCGAGCCCGAGGACTTTGCCGTCTATTAC |
| | | TGCCAGCAGTACGGCTCCTCCTCATGGACGTTCGGCCAGGGGACCAAG |
| | | GTCGAAATCAAGACCACTACCCCAGCACCGAGGCCACCCACCCCGGCT |
| | | CCTACCATCGCCTCCCAGCCTCTGTCCCTGCGTCCGGAGGCATGTAGA |
| | | CCCGCAGCTGGTGGGGCCGTGCATACCCGGGGTCTTGACTTCGCCTGC |
| | | GATATCTACATTTGGGCCCCTCTGGCTGGTACTTGCGGGGTCCTGCTG |
| | | CTTTCACTCGTGATCACTCTTTACTGTAAGCGCGGTCGGAAGAAGCTG |
| | | CTGTACATCTTTAAGCAACCCTTCATGAGGCCTGTGCAGACTACTCAA |
| | | GAGGAGGACGGCTGTTCATGCCGGTTCCCAGAGGAGGAGGAAGGCGGC |
| | | TGCGAACTGCGCGTGAAATTCAGCCGCAGCGCAGATGCTCCAGCCTAC |
| | | AAGCAGGGGCAGAACCAGCTCTACAACGAACTCAATCTTGGTCGGAGA |
| | | GAGGAGTACGACGTGCTGGACAAGCGGAGAGGACGGGACCCAGAAATG |
| | | GGCGGGAAGCCGCGCAGAAAGAATCCCCAAGAGGGCCTGTACAACGAG |
| | | CTCCAAAAGGATAAGATGGCAGAAGCCTATAGCGAGATTGGTATGAAA |
| | | GGGGAACGCAGAAGAGGCAAAGGCCACGACGGACTGTACCAGGGACTC |
| | | AGCACCGCCACCAAGGACACCTATGACGCTCTTCACATGCAGGCCCTG |
| | | CCGCCTCGG |

139107

| | | |
|---|---|---|
| 139107-aa | 184 | EVQLVETGGGVVQPGGSLRLSCAVSGFALSNHGMSWVRRAPGKGLEWV |
| ScFv | | SGIVYSGSTYYAASVKGRFTISRDNSRNTLYLQMNSLRPEDTAIYYCS |
| domain | | AHGGESDVWGQGTTVTVSSASGGGGSGGRASGGGGSEIVLTQSPGTLS |
| | | LSPGERATLSCRASQSVGSTNLAWYQQKPGQAPRLLIYDASNRATGIP |
| | | DRFSGGGSGTDFTLTISRLEPEDFAVYYCQQYGSSPPWTFGQGTKVEI |
| | | K |
| 139107-nt | 185 | GAAGTGCAATTGGTGGAGACTGGAGGAGGAGTGGTGCAACCTGGAGGA |
| ScFv | | AGCCTGAGACTGTCATGCGCGGTGTCGGGCTTCGCCCTCTCCAACCAC |
| domain | | GGAATGTCCTGGGTCCGCCGGGCCCCTGGGAAAGGACTTGAATGGGTG |
| | | TCCGGCATCGTGTACTCGGGTTCCACCTACTACGCGGCCTCAGTGAAG |
| | | GGCCGGTTTACTATTAGCCGCGACAACTCCAGAAACACACTGTACCTC |
| | | CAAATGAACTCGCTGCGGCCGGAAGATACCGCTATCTACTACTGCTCC |
| | | GCCCATGGGGGAGAGTCGGACGTCTGGGGACAGGGCACCACTGTCACT |
| | | GTGTCCAGCGCTTCCGGCGGTGGTGGAAGCGGGGGACGGGCCTCAGGA |
| | | GGCGGTGGCAGCGAGATTGTGCTGACCCAGTCCCCCGGGACCCTGAGC |
| | | CTGTCCCCGGGAGAAAGGGCCACCCTCTCCTGTCGGGCATCCCAGTCC |
| | | GTGGGGTCTACTAACCTTGCATGGTACCAGCAGAAGCCCGGCCAGGCC |
| | | CCTCGCCTGCTGATCTACGACGCGTCCAATAGAGCCACCGGCATCCCG |
| | | GATCGCTTCAGCGGAGGCGGATCGGGCACCGACTTCACCCTCACCATT |
| | | TCAAGGCTGGAACCGGAGGACTTCGCCGTGTACTACTGCCAGCAGTAT |
| | | GGTTCGTCCCCACCCTGGACGTTCGGCCAGGGGACTAAGGTCGAGATC |
| | | AAG |
| 139107-aa | 186 | EVQLVETGGGVVQPGGSLRLSCAVSGFALSNHGMSWVRRAPGKGLEWV |
| VH | | SGIVYSGSTYYAASVKGRFTISRDNSRNTLYLQMNSLRPEDTAIYYCS |
| | | AHGGESDVWGQGTTVTVSS |
| 139107-aa | 187 | EIVLTQSPGTLSLSPGERATLSCRASQSVGSTNLAWYQQKPGQAPRLL |
| VL | | IYDASNRATGIPDRFSGGGSGTDFTLTISRLEPEDFAVYYCQQYGSSP |
| | | PWTFGQGTKVEIK |
| 139107-aa | 188 | MALPVTALLLPLALLLHAARPEVQLVETGGGVVQPGGSLRLSCAVSGF |
| Full CAR | | ALSNHGMSWVRRAPGKGLEWVSGIVYSGSTYYAASVKGRFTISRDNSR |
| | | NTLYLQMNSLRPEDTAIYYCSAHGGESDVWGQGTTVTVSSASGGGGSG |
| | | GRASGGGGSEIVLTQSPGTLSLSPGERATLSCRASQSVGSTNLAWYQQ |
| | | KPGQAPRLLIYDASNRATGIPDRFSGGGSGTDFTLTISRLEPEDFAVY |
| | | YCQQYGSSPPWTFGQGTKVEIKTTTPAPRPPTPAPTIASQPLSLRPEA |
| | | CRPAAGGAVHTRGLDFACDIYIWAPLAGTCGVLLLSLVITLYCKRGRK |
| | | KLLYIFKQPFMRPVQTTQEEDGCSCRFPEEEEGGCELRVKFSRSADAP |
| | | AYKQGQNQLYNELNLGRREEYDVLDKRRGRDPEMGGKPRRKNPQEGLY |
| | | NELQKDKMAEAYSEIGMKGERRRGKGHDGLYQGLSTATKDTYDALHMQ |
| | | ALPPR |
| 139107-nt | 189 | ATGGCCCTCCCTGTCACCGCCCTGCTGCTTCCGCTGGCTCTTCTGCTC |
| Full CAR | | CACGCCGCTCGGCCCGAAGTGCAATTGGTGGAGACTGGAGGAGGAGTG |
| | | GTGCAACCTGGAGGAAGCCTGAGACTGTCATGCGCGGTGTCGGGCTTC |
| | | GCCCTCTCCAACCACGGAATGTCCTGGGTCCGCCGGGCCCCTGGGAAA |
| | | GGACTTGAATGGGTGTCCGGCATCGTGTACTCGGGTTCCACCTACTAC |
| | | GCGGCCTCAGTGAAGGGCCGGTTTACTATTAGCCGCGACAACTCCAGA |
| | | AACACACTGTACCTCCAAATGAACTCGCTGCGGCCGGAAGATACCGCT |
| | | ATCTACTACTGCTCCGCCCATGGGGGAGAGTCGGACGTCTGGGGACAG |
| | | GGCACCACTGTCACTGTGTCCAGCGCTTCCGGCGGTGGTGGAAGCGGG |
| | | GGACGGGCCTCAGGAGGCGGTGGCAGCGAGATTGTGCTGACCCAGTCC |
| | | CCCGGGACCCTGAGCCTGTCCCCGGGAGAAAGGGCCACCCTCTCCTGT |
| | | CGGGCATCCCAGTCCGTGGGGTCTACTAACCTTGCATGGTACCAGCAG |
| | | AAGCCCGGCCAGGCCCCTCGCCTGCTGATCTACGACGCGTCCAATAGA |
| | | GCCACCGGCATCCCGGATCGCTTCAGCGGAGGCGGATCGGGCACCGAC |
| | | TTCACCCTCACCATTTCAAGGCTGGAACCGGAGGACTTCGCCGTGTAC |
| | | TACTGCCAGCAGTATGGTTCGTCCCCACCCTGGACGTTCGGCCAGGGG |
| | | ACTAAGGTCGAGATCAAGACCACTACCCCAGCACCGAGGCCACCCACC |
| | | CCGGCTCCTACCATCGCCTCCCAGCCTCTGTCCCTGCGTCCGGAGGCA |
| | | TGTAGACCCGCAGCTGGTGGGGCCGTGCATACCCGGGGTCTTGACTTC |
| | | GCCTGCGATATCTACATTTGGGCCCCTCTGGCTGGTACTTGCGGGGTC |
| | | CTGCTGCTTTCACTCGTGATCACTCTTTACTGTAAGCGCGGTCGGAAG |
| | | AAGCTGCTGTACATCTTTAAGCAACCCTTCATGAGGCCTGTGCAGACT |
| | | ACTCAAGAGGAGGACGGCTGTTCATGCCGGTTCCCAGAGGAGGAGGAA |
| | | GGCGGCTGCGAACTGCGCGTGAAATTCAGCCGCAGCGCAGATGCTCCA |
| | | GCCTACAAGCAGGGGCAGAACCAGCTCTACAACGAACTCAATCTTGGT |
| | | CGGAGAGAGGAGTACGACGTGCTGGACAAGCGGAGAGGACGGGACCCA |
| | | GAAATGGGCGGGAAGCCGCGCAGAAAGAATCCCCAAGAGGGCCTGTAC |
| | | AACGAGCTCCAAAAGGATAAGATGGCAGAAGCCTATAGCGAGATTGGT |
| | | ATGAAAGGGGAACGCAGAAGAGGCAAAGGCCACGACGGACTGTACCAG |
| | | GGACTCAGCACCGCCACCAAGGACACCTATGACGCTCTTCACATGCAG |
| | | GCCCTGCCGCCTCGG |

139108

| | | |
|---|---|---|
| 139108-aa | 190 | QVQLVESGGGLVKPGGSLRLSCAASGFTFSDYYMSWIRQAPGKGLEWV |
| ScFv | | SYISSSGSTIYYADSVKGRFTISRDNAKNSLYLQMNSLRAEDTAVYYC |
| domain | | ARESGDGMDVWGQGTTVTVSSASGGGGSGGRASGGGGSDIQMTQSPSS |
| | | LSASVGDRVTITCRASQSISSYLNWYQQKPGKAPKLLIYAASSLQSGV |
| | | PSRFSGSGSGTDFTLTISSLQPEDFATYYCQQSYTLAFGQGTKVDIK |
| 139108-nt | 191 | CAAGTGCAACTCGTGGAATCTGGTGGAGGACTCGTGAAACCTGGAGGA |
| ScFv | | TCATTGAGACTGTCATGCGCGGCCTCGGGATTCACGTTCTCCGATTAC |
| domain | | TACATGAGCTGGATTCGCCAGGCTCCGGGGAAGGGACTGGAATGGGTG |
| | | TCCTACATTTCCTCATCCGGCTCCACCATCTACTACGCGGACTCCGTG |
| | | AAGGGGAGATTCACCATTAGCCGCGATAACGCCAAGAACAGCCTGTAC |
| | | CTTCAGATGAACTCCCTGCGGGCTGAAGATACTGCCGTCTACTACTGC |
| | | GCAAGGGAGAGCGGAGATGGGATGGACGTCTGGGGACAGGGTACCACT |
| | | GTGACCGTGTCGTCGGCCTCCGGCGGAGGGGGTTCGGGTGGAAGGGCC |
| | | AGCGGCGGCGGAGGCAGCGACATCCAGATGACCCAGTCCCCCTCATCG |
| | | CTGTCCGCCTCCGTGGGCGACCGCGTCACCATCACATGCCGGGCCTCA |
| | | CAGTCGATCTCCTCCTACCTCAATTGGTATCAGCAGAAGCCCGGAAAG |
| | | GCCCCTAAGCTTCTGATCTACGCAGCGTCCTCCCTGCAATCCGGGGTC |
| | | CCATCTCGGTTCTCCGGCTCGGGCAGCGGTACCGACTTCACTCTGACC |
| | | ATCTCGAGCCTGCAGCCGGAGGACTTCGCCACTTACTACTGTCAGCAA |
| | | AGCTACACCCTCGCGTTTGGCCAGGGCACCAAAGTGGACATCAAG |
| 139108-aa | 192 | QVQLVESGGGLVKPGGSLRLSCAASGFTFSDYYMSWIRQAPGKGLEWV |
| VH | | SYISSSGSTIYYADSVKGRFTISRDNAKNSLYLQMNSLRAEDTAVYYC |
| | | ARESGDGMDVWGQGTTVTVSS |
| 139108-aa | 193 | DIQMTQSPSSLSASVGDRVTITCRASQSISSYLNWYQQKPGKAPKLLI |
| VL | | YAASSLQSGVPSRFSGSGSGTDFTLTISSLQPEDFATYYCQQSYTLAF |
| | | GQGTKVDIK |
| 139108-aa | 194 | MALPVTALLLPLALLLHAARPQVQLVESGGGLVKPGGSLRLSCAASGF |
| Full CAR | | TFSDYYMSWIRQAPGKGLEWVSYISSSGSTIYYADSVKGRFTISRDNA |
| | | KNSLYLQMNSLRAEDTAVYYCARESGDGMDVWGQGTTVTVSSASGGGG |
| | | SGGRASGGGGSDIQMTQSPSSLSASVGDRVTITCRASQSISSYLNWYQ |
| | | QKPGKAPKLLIYAASSLQSGVPSRFSGSGSGTDFTLTISSLQPEDFAT |
| | | YYCQQSYTLAFGQGTKVDIKTTTPAPRPPTPAPTIASQPLSLRPEACR |
| | | PAAGGAVHTRGLDFACDIYIWAPLAGTCGVLLLSLVITLYCKRGRKKL |
| | | LYIFKQPFMRPVQTTQEEDGCSCRFPEEEEGGCELRVKFSRSADAPAY |
| | | KQGQNQLYNELNLGRREEYDVLDKRRGRDPEMGGKPRRKNPQEGLYNE |
| | | LQKDKMAEAYSEIGMKGERRRGKGHDGLYQGLSTATKDTYDALHMQAL |
| | | PPR |
| 139108-nt | 195 | ATGGCCCTCCCTGTCACCGCCCTGCTGCTTCCGCTGGCTCTTCTGCTC |
| Full CAR | | CACGCCGCTCGGCCCCAAGTGCAACTCGTGGAATCTGGTGGAGGACTC |
| | | GTGAAACCTGGAGGATCATTGAGACTGTCATGCGCGGCCTCGGGATTC |
| | | ACGTTCTCCGATTACTACATGAGCTGGATTCGCCAGGCTCCGGGGAAG |
| | | GGACTGGAATGGGTGTCCTACATTTCCTCATCCGGCTCCACCATCTAC |
| | | TACGCGGACTCCGTGAAGGGGAGATTCACCATTAGCCGCGATAACGCC |
| | | AAGAACAGCCTGTACCTTCAGATGAACTCCCTGCGGGCTGAAGATACT |
| | | GCCGTCTACTACTGCGCAAGGGAGAGCGGAGATGGGATGGACGTCTGG |
| | | GGACAGGGTACCACTGTGACCGTGTCGTCGGCCTCCGGCGGAGGGGGT |
| | | TCGGGTGGAAGGGCCAGCGGCGGCGGAGGCAGCGACATCCAGATGACC |
| | | CAGTCCCCCTCATCGCTGTCCGCCTCCGTGGGCGACCGCGTCACCATC |
| | | ACATGCCGGGCCTCACAGTCGATCTCCTCCTACCTCAATTGGTATCAG |
| | | CAGAAGCCCGGAAAGGCCCCTAAGCTTCTGATCTACGCAGCGTCCTCC |
| | | CTGCAATCCGGGGTCCCATCTCGGTTCTCCGGCTCGGGCAGCGGTACC |
| | | GACTTCACTCTGACCATCTCGAGCCTGCAGCCGGAGGACTTCGCCACT |
| | | TACTACTGTCAGCAAAGCTACACCCTCGCGTTTGGCCAGGGCACCAAA |
| | | GTGGACATCAAGACCACTACCCCAGCACCGAGGCCACCCACCCCGGCT |
| | | CCTACCATCGCCTCCCAGCCTCTGTCCCTGCGTCCGGAGGCATGTAGA |
| | | CCCGCAGCTGGTGGGGCCGTGCATACCCGGGGTCTTGACTTCGCCTGC |
| | | GATATCTACATTTGGGCCCCTCTGGCTGGTACTTGCGGGGTCCTGCTG |
| | | CTTTCACTCGTGATCACTCTTTACTGTAAGCGCGGTCGGAAGAAGCTG |
| | | CTGTACATCTTTAAGCAACCCTTCATGAGGCCTGTGCAGACTACTCAA |
| | | GAGGAGGACGGCTGTTCATGCCGGTTCCCAGAGGAGGAGGAAGGCGGC |
| | | TGCGAACTGCGCGTGAAATTCAGCCGCAGCGCAGATGCTCCAGCCTAC |
| | | AAGCAGGGGCAGAACCAGCTCTACAACGAACTCAATCTTGGTCGGAGA |
| | | GAGGAGTACGACGTGCTGGACAAGCGGAGAGGACGGGACCCAGAAATG |
| | | GGCGGGAAGCCGCGCAGAAAGAATCCCCAAGAGGGCCTGTACAACGAG |
| | | CTCCAAAAGGATAAGATGGCAGAAGCCTATAGCGAGATTGGTATGAAA |
| | | GGGGAACGCAGAAGAGGCAAAGGCCACGACGGACTGTACCAGGGACTC |
| | | AGCACCGCCACCAAGGACACCTATGACGCTCTTCACATGCAGGCCCTG |
| | | CCGCCTCGG |

139110

| | | |
|---|---|---|
| 139110-aa | 196 | QVQLVQSGGGLVKPGGSLRLSCAASGFTFSDYYMSWIRQAPGKGLEWV |
| ScFv | | SYISSSGNTIYYADSVKGRFTISRDNAKNSLYLQMNSLRAEDTAVYYC |
| domain | | ARSTMVREDYWGQGTLVTVSSASGGGGSGGRASGGGGSDIVLTQSPLS |
| | | LPVTLGQPASISCKSSESLVHNSGKTYLNWFHQRPGQSPRRLIYEVSN |
| | | RDSGVPDRFTGSGSGTDFTLKISRVEAEDVGVYYCMQGTHWPGTFGQG |
| | | TKLEIK |
| 139110-nt | 197 | CAAGTGCAACTGGTGCAAAGCGGAGGAGGATTGGTCAAACCCGGAGGA |
| ScFv | | AGCCTGAGACTGTCATGCGCGGCCTCTGGATTCACCTTCTCCGATTAC |
| domain | | TACATGTCATGGATCAGACAGGCCCCGGGGAAGGGCCTCGAATGGGTG |
| | | TCCTACATCTCGTCCTCCGGGAACACCATCTACTACGCCGACAGCGTG |
| | | AAGGGCCGCTTTACCATTTCCCGCGACAACGCAAAGAACTCGCTGTAC |
| | | CTTCAGATGAATTCCCTGCGGGCTGAAGATACCGCGGTGTACTATTGC |
| | | GCCCGGTCCACTATGGTCCGGGAGGACTACTGGGGACAGGGCACACTC |
| | | GTGACCGTGTCCAGCGCGAGCGGGGGTGGAGGCAGCGGTGGACGCGCC |
| | | TCCGGCGGCGGCGGTTCAGACATCGTGCTGACTCAGTCGCCCCTGTCG |
| | | CTGCCGGTCACCCTGGGCCAACCGGCCTCAATTAGCTGCAAGTCCTCG |
| | | GAGAGCCTGGTGCACAACTCAGGAAAGACTTACCTGAACTGGTTCCAT |
| | | CAGCGGCCTGGACAGTCCCCACGGAGGCTCATCTATGAAGTGTCCAAC |
| | | AGGGATTCGGGGGTGCCCGACCGCTTCACTGGCTCCGGGTCCGGCACC |
| | | GACTTCACCTTGAAAATCTCCAGAGTGGAAGCCGAGGACGTGGGCGTG |
| | | TACTACTGTATGCAGGGTACCCACTGGCCTGGAACCTTTGGACAAGGA |
| | | ACTAAGCTCGAGATTAAG |
| 139110-aa | 198 | QVQLVQSGGGLVKPGGSLRLSCAASGFTFSDYYMSWIRQAPGKGLEWV |
| VH | | SYISSSGNTIYYADSVKGRFTISRDNAKNSLYLQMNSLRAEDTAVYYC |
| | | ARSTMVREDYWGQGTLVTVSS |
| 139110-aa | 199 | DIVLTQSPLSLPVTLGQPASISCKSSESLVHNSGKTYLNWFHQRPGQS |
| VL | | PRRLIYEVSNRDSGVPDRFTGSGSGTDFTLKISRVEAEDVGVYYCMQG |
| | | THWPGTFGQGTKLEIK |
| 139110-aa | 200 | MALPVTALLLPLALLLHAARPQVQLVQSGGGLVKPGGSLRLSCAASGF |
| Full CAR | | TFSDYYMSWIRQAPGKGLEWVSYISSSGNTIYYADSVKGRFTISRDNA |
| | | KNSLYLQMNSLRAEDTAVYYCARSTMVREDYWGQGTLVTVSSASGGGG |
| | | SGGRASGGGGSDIVLTQSPLSLPVTLGQPASISCKSSESLVHNSGKTY |
| | | LNWFHQRPGQSPRRLIYEVSNRDSGVPDRFTGSGSGTDFTLKISRVEA |
| | | EDVGVYYCMQGTHWPGTFGQGTKLEIKTTTPAPRPPTPAPTIASQPLS |
| | | LRPEACRPAAGGAVHTRGLDFACDIYIWAPLAGTCGVLLLSLVITLYC |
| | | KRGRKKLLYIFKQPFMRPVQTTQEEDGCSCRFPEEEEGGCELRVKFSR |
| | | SADAPAYKQGQNQLYNELNLGRREEYDVLDKRRGRDPEMGGKPRRKNP |
| | | QEGLYNELQKDKMAEAYSEIGMKGERRRGKGHDGLYQGLSTATKDTYD |
| | | ALHMQALPPR |
| 139110-nt | 201 | ATGGCCCTCCCTGTCACCGCCCTGCTGCTTCCGCTGGCTCTTCTGCTC |
| Full CAR | | CACGCCGCTCGGCCCCAAGTGCAACTGGTGCAAAGCGGAGGAGGATTG |
| | | GTCAAACCCGGAGGAAGCCTGAGACTGTCATGCGCGGCCTCTGGATTC |
| | | ACCTTCTCCGATTACTACATGTCATGGATCAGACAGGCCCCGGGGAAG |
| | | GGCCTCGAATGGGTGTCCTACATCTCGTCCTCCGGGAACACCATCTAC |
| | | TACGCCGACAGCGTGAAGGGCCGCTTTACCATTTCCCGCGACAACGCA |
| | | AAGAACTCGCTGTACCTTCAGATGAATTCCCTGCGGGCTGAAGATACC |
| | | GCGGTGTACTATTGCGCCCGGTCCACTATGGTCCGGGAGGACTACTGG |
| | | GGACAGGGCACACTCGTGACCGTGTCCAGCGCGAGCGGGGGTGGAGGC |
| | | AGCGGTGGACGCGCCTCCGGCGGCGGCGGTTCAGACATCGTGCTGACT |
| | | CAGTCGCCCCTGTCGCTGCCGGTCACCCTGGGCCAACCGGCCTCAATT |
| | | AGCTGCAAGTCCTCGGAGAGCCTGGTGCACAACTCAGGAAAGACTTAC |
| | | CTGAACTGGTTCCATCAGCGGCCTGGACAGTCCCCACGGAGGCTCATC |
| | | TATGAAGTGTCCAACAGGGATTCGGGGGTGCCCGACCGCTTCACTGGC |
| | | TCCGGGTCCGGCACCGACTTCACCTTGAAAATCTCCAGAGTGGAAGCC |
| | | GAGGACGTGGGCGTGTACTACTGTATGCAGGGTACCCACTGGCCTGGA |
| | | ACCTTTGGACAAGGAACTAAGCTCGAGATTAAGACCACTACCCCAGCA |
| | | CCGAGGCCACCCACCCCGGCTCCTACCATCGCCTCCCAGCCTCTGTCC |
| | | CTGCGTCCGGAGGCATGTAGACCCGCAGCTGGTGGGGCCGTGCATACC |
| | | CGGGGTCTTGACTTCGCCTGCGATATCTACATTTGGGCCCCTCTGGCT |
| | | GGTACTTGCGGGGTCCTGCTGCTTTCACTCGTGATCACTCTTTACTGT |
| | | AAGCGCGGTCGGAAGAAGCTGCTGTACATCTTTAAGCAACCCTTCATG |
| | | AGGCCTGTGCAGACTACTCAAGAGGAGGACGGCTGTTCATGCCGGTTC |
| | | CCAGAGGAGGAGGAAGGCGGCTGCGAACTGCGCGTGAAATTCAGCCGC |
| | | AGCGCAGATGCTCCAGCCTACAAGCAGGGGCAGAACCAGCTCTACAAC |
| | | GAACTCAATCTTGGTCGGAGAGAGGAGTACGACGTGCTGGACAAGCGG |
| | | AGAGGACGGGACCCAGAAATGGGCGGGAAGCCGCGCAGAAAGAATCCC |
| | | CAAGAGGGCCTGTACAACGAGCTCCAAAAGGATAAGATGGCAGAAGCC |
| | | TATAGCGAGATTGGTATGAAAGGGGAACGCAGAAGAGGCAAAGGCCAC |
| | | GACGGACTGTACCAGGGACTCAGCACCGCCACCAAGGACACCTATGAC |
| | | GCTCTTCACATGCAGGCCCTGCCGCCTCGG |

139112

| | | |
|---|---|---|
| 139112-aa | 202 | QVQLVESGGGLVQPGGSLRLSCAVSGFALSNHGMSWVRRAPGKGLEWV |
| ScFv | | SGIVYSGSTYYAASVKGRFTISRDNSRNTLYLQMNSLRPEDTAIYYCS |
| domain | | AHGGESDVWGQGTTVTVSSASGGGGSGGRASGGGGSDIRLTQSPSPLS |
| | | ASVGDRVTITCQASEDINKFLNWYHQTPGKAPKLLIYDASTLQTGVPS |
| | | RFSGSGSGTDFTLTINSLQPEDIGTYYCQQYESLPLTFGGGTKVEIK |
| 139112-nt | 203 | CAAGTGCAACTCGTGGAATCTGGTGGAGGACTCGTGCAACCCGGTGGA |
| ScFv | | AGCCTTAGGCTGTCGTGCGCCGTCAGCGGGTTTGCTCTGAGCAACCAT |
| domain | | GGAATGTCCTGGGTCCGCCGGGCACCGGGAAAAGGGCTGGAATGGGTG |
| | | TCCGGCATCGTGTACAGCGGGTCAACCTATTACGCCGCGTCCGTGAAG |
| | | GGCAGATTCACTATCTCAAGAGACAACAGCCGGAACACCCTGTACTTG |
| | | CAAATGAATTCCCTGCGCCCCGAGGACACCGCCATCTACTACTGCTCC |
| | | GCCCACGGAGGAGAGTCGGACGTGTGGGGCCAGGGAACGACTGTGACT |
| | | GTGTCCAGCGCATCAGGAGGGGGTGGTTCGGGCGGCCGGGCCTCGGGG |
| | | GGAGGAGGTTCCGACATTCGGCTGACCCAGTCCCCGTCCCCACTGTCG |
| | | GCCTCCGTCGGCGACCGCGTGACCATCACTTGTCAGGCGTCCGAGGAC |
| | | ATTAACAAGTTCCTGAACTGGTACCACCAGACCCCTGGAAAGGCCCCC |
| | | AAGCTGCTGATCTACGATGCCTCGACCCTTCAAACTGGAGTGCCTAGC |
| | | CGGTTCTCCGGGTCCGGCTCCGGCACTGATTTCACTCTGACCATCAAC |
| | | TCATTGCAGCCGGAAGATATCGGGACCTACTATTGCCAGCAGTACGAA |
| | | TCCCTCCCGCTCACATTCGGCGGGGGAACCAAGGTCGAGATTAAG |
| 139112-aa | 204 | QVQLVESGGGLVQPGGSLRLSCAVSGFALSNHGMSWVRRAPGKGLEWV |
| VH | | SGIVYSGSTYYAASVKGRFTISRDNSRNTLYLQMNSLRPEDTAIYYCS |
| | | AHGGESDVWGQGTTVTVSS |
| 139112-aa | 205 | DIRLTQSPSPLSASVGDRVTITCQASEDINKFLNWYHQTPGKAPKLLI |
| VL | | YDASTLQTGVPSRFSGSGSGTDFTLTINSLQPEDIGTYYCQQYESLPL |
| | | TFGGGTKVEIK |
| 139112-aa | 206 | MALPVTALLLPLALLLHAARPQVQLVESGGGLVQPGGSLRLSCAVSGF |
| Full CAR | | ALSNHGMSWVRRAPGKGLEWVSGIVYSGSTYYAASVKGRFTISRDNSR |
| | | NTLYLQMNSLRPEDTAIYYCSAHGGESDVWGQGTTVTVSSASGGGGSG |
| | | GRASGGGGSDIRLTQSPSPLSASVGDRVTITCQASEDINKFLNWYHQT |
| | | PGKAPKLLIYDASTLQTGVPSRFSGSGSGTDFTLTINSLQPEDIGTYY |
| | | CQQYESLPLTFGGGTKVEIKTTTPAPRPPTPAPTIASQPLSLRPEACR |
| | | PAAGGAVHTRGLDFACDIYIWAPLAGTCGVLLLSLVITLYCKRGRKKL |
| | | LYIFKQPFMRPVQTTQEEDGCSCRFPEEEEGGCELRVKFSRSADAPAY |
| | | KQGQNQLYNELNLGRREEYDVLDKRRGRDPEMGGKPRRKNPQEGLYNE |
| | | LQKDKMAEAYSEIGMKGERRRGKGHDGLYQGLSTATKDTYDALHMQAL |
| | | PPR |
| 139112-nt | 207 | ATGGCCCTCCCTGTCACCGCCCTGCTGCTTCCGCTGGCTCTTCTGCTC |
| Full CAR | | CACGCCGCTCGGCCCCAAGTGCAACTCGTGGAATCTGGTGGAGGACTC |
| | | GTGCAACCCGGTGGAAGCCTTAGGCTGTCGTGCGCCGTCAGCGGGTTT |
| | | GCTCTGAGCAACCATGGAATGTCCTGGGTCCGCCGGGCACCGGGAAAA |
| | | GGGCTGGAATGGGTGTCCGGCATCGTGTACAGCGGGTCAACCTATTAC |
| | | GCCGCGTCCGTGAAGGGCAGATTCACTATCTCAAGAGACAACAGCCGG |
| | | AACACCCTGTACTTGCAAATGAATTCCCTGCGCCCCGAGGACACCGCC |
| | | ATCTACTACTGCTCCGCCCACGGAGGAGAGTCGGACGTGTGGGGCCAG |
| | | GGAACGACTGTGACTGTGTCCAGCGCATCAGGAGGGGGTGGTTCGGGC |
| | | GGCCGGGCCTCGGGGGGAGGAGGTTCCGACATTCGGCTGACCCAGTCC |
| | | CCGTCCCCACTGTCGGCCTCCGTCGGCGACCGCGTGACCATCACTTGT |
| | | CAGGCGTCCGAGGACATTAACAAGTTCCTGAACTGGTACCACCAGACC |
| | | CCTGGAAAGGCCCCCAAGCTGCTGATCTACGATGCCTCGACCCTTCAA |
| | | ACTGGAGTGCCTAGCCGGTTCTCCGGGTCCGGCTCCGGCACTGATTTC |
| | | ACTCTGACCATCAACTCATTGCAGCCGGAAGATATCGGGACCTACTAT |
| | | TGCCAGCAGTACGAATCCCTCCCGCTCACATTCGGCGGGGGAACCAAG |
| | | GTCGAGATTAAGACCACTACCCCAGCACCGAGGCCACCCACCCCGGCT |
| | | CCTACCATCGCCTCCCAGCCTCTGTCCCTGCGTCCGGAGGCATGTAGA |
| | | CCCGCAGCTGGTGGGGCCGTGCATACCCGGGGTCTTGACTTCGCCTGC |
| | | GATATCTACATTTGGGCCCCTCTGGCTGGTACTTGCGGGGTCCTGCTG |
| | | CTTTCACTCGTGATCACTCTTTACTGTAAGCGCGGTCGGAAGAAGCTG |
| | | CTGTACATCTTTAAGCAACCCTTCATGAGGCCTGTGCAGACTACTCAA |
| | | GAGGAGGACGGCTGTTCATGCCGGTTCCCAGAGGAGGAGGAAGGCGGC |
| | | TGCGAACTGCGCGTGAAATTCAGCCGCAGCGCAGATGCTCCAGCCTAC |
| | | AAGCAGGGGCAGAACCAGCTCTACAACGAACTCAATCTTGGTCGGAGA |
| | | GAGGAGTACGACGTGCTGGACAAGCGGAGAGGACGGGACCCAGAAATG |
| | | GGCGGGAAGCCGCGCAGAAAGAATCCCCAAGAGGGCCTGTACAACGAG |
| | | CTCCAAAAGGATAAGATGGCAGAAGCCTATAGCGAGATTGGTATGAAA |
| | | GGGGAACGCAGAAGAGGCAAAGGCCACGACGGACTGTACCAGGGACTC |
| | | AGCACCGCCACCAAGGACACCTATGACGCTCTTCACATGCAGGCCCTG |
| | | CCGCCTCGG |

139113

| | | |
|---|---|---|
| 139113-aa | 208 | EVQLVETGGGLVQPGGSLRLSCAVSGFALSNHGMSWVRRAPGKGLEWV |
| ScFv | | SGIVYSGSTYYAASVKGRFTISRDNSRNTLYLQMNSLRPEDTAIYYCS |
| domain | | AHGGESDVWGQGTTVTVSSASGGGGSGGRASGGGGSETTLTQSPATLS |
| | | VSPGERATLSCRASQSVGSNLAWYQQKPGQGPRLLIYGASTRATGIPA |
| | | RFSGSGSGTEFTLTISSLQPEDFAVYYCQQYNDWLPVTFGQGTKVEIK |
| 139113-nt | 209 | GAAGTGCAATTGGTGGAAACTGGAGGAGGACTTGTGCAACCTGGAGGA |
| ScFv | | TCATTGCGGCTCTCATGCGCTGTCTCCGGCTTCGCCCTGTCAAATCAC |
| domain | | GGGATGTCGTGGGTCAGACGGGCCCCGGGAAAGGGTCTGGAATGGGTG |
| | | TCGGGGATTGTGTACAGCGGCTCCACCTACTACGCCGCTTCGGTCAAG |
| | | GGCCGCTTCACTATTTCACGGGACAACAGCCGCAACACCCTCTATCTG |
| | | CAAATGAACTCTCTCCGCCCGGAGGATACCGCCATCTACTACTGCTCC |
| | | GCACACGGCGGCGAATCCGACGTGTGGGGACAGGGAACCACTGTCACC |
| | | GTGTCGTCCGCATCCGGTGGCGGAGGATCGGGTGGCCGGGCCTCCGGG |
| | | GGCGGCGGCAGCGAGACTACCCTGACCCAGTCCCCTGCCACTCTGTCC |
| | | GTGAGCCCGGGAGAGAGAGCCACCCTTAGCTGCCGGGCCAGCCAGAGC |
| | | GTGGGCTCCAACCTGGCCTGGTACCAGCAGAAGCCAGGACAGGGTCCC |
| | | AGGCTGCTGATCTACGGAGCCTCCACTCGCGCGACCGGCATCCCCGCG |
| | | AGGTTCTCCGGGTCGGGTTCCGGGACCGAGTTCACCCTGACCATCTCC |
| | | TCCCTCCAACCGGAGGACTTCGCGGTGTACTACTGTCAGCAGTACAAC |
| | | GATTGGCTGCCCGTGACATTTGGACAGGGGACGAAGGTGGAAATCAAA |
| 139113-aa | 210 | EVQLVETGGGLVQPGGSLRLSCAVSGFALSNHGMSWVRRAPGKGLEWV |
| VH | | SGIVYSGSTYYAASVKGRFTISRDNSRNTLYLQMNSLRPEDTAIYYCS |
| | | AHGGESDVWGQGTTVTVSS |
| 139113-aa | 211 | ETTLTQSPATLSVSPGERATLSCRASQSVGSNLAWYQQKPGQGPRLLI |
| VL | | YGASTRATGIPARFSGSGSGTEFTLTISSLQPEDFAVYYCQQYNDWLP |
| | | VTFGQGTKVEIK |
| 139113-aa | 212 | MALPVTALLLPLALLLHAARPEVQLVETGGGLVQPGGSLRLSCAVSGF |
| Full CAR | | ALSNHGMSWVRRAPGKGLEWVSGIVYSGSTYYAASVKGRFTISRDNSR |
| | | NTLYLQMNSLRPEDTAIYYCSAHGGESDVWGQGTTVTVSSASGGGGSG |
| | | GRASGGGGSETTLTQSPATLSVSPGERATLSCRASQSVGSNLAWYQQK |
| | | PGQGPRLLIYGASTRATGIPARFSGSGSGTEFTLTISSLQPEDFAVYY |
| | | CQQYNDWLPVTFGQGTKVEIKTTTPAPRPPTPAPTIASQPLSLRPEAC |
| | | RPAAGGAVHTRGLDFACDIYIWAPLAGTCGVLLLSLVITLYCKRGRKK |
| | | LLYIFKQPFMRPVQTTQEEDGCSCRFPEEEEGGCELRVKFSRSADAPA |
| | | YKQGQNQLYNELNLGRREEYDVLDKRRGRDPEMGGKPRRKNPQEGLYN |
| | | ELQKDKMAEAYSEIGMKGERRRGKGHDGLYQGLSTATKDTYDALHMQA |
| | | LPPR |
| 139113-nt | 213 | ATGGCCCTCCCTGTCACCGCCCTGCTGCTTCCGCTGGCTCTTCTGCTC |
| Full CAR | | CACGCCGCTCGGCCCGAAGTGCAATTGGTGGAAACTGGAGGAGGACTT |
| | | GTGCAACCTGGAGGATCATTGCGGCTCTCATGCGCTGTCTCCGGCTTC |
| | | GCCCTGTCAAATCACGGGATGTCGTGGGTCAGACGGGCCCCGGGAAAG |
| | | GGTCTGGAATGGGTGTCGGGGATTGTGTACAGCGGCTCCACCTACTAC |
| | | GCCGCTTCGGTCAAGGGCCGCTTCACTATTTCACGGGACAACAGCCGC |
| | | AACACCCTCTATCTGCAAATGAACTCTCTCCGCCCGGAGGATACCGCC |
| | | ATCTACTACTGCTCCGCACACGGCGGCGAATCCGACGTGTGGGGACAG |
| | | GGAACCACTGTCACCGTGTCGTCCGCATCCGGTGGCGGAGGATCGGGT |
| | | GGCCGGGCCTCCGGGGGCGGCGGCAGCGAGACTACCCTGACCCAGTCC |
| | | CCTGCCACTCTGTCCGTGAGCCCGGGAGAGAGAGCCACCCTTAGCTGC |
| | | CGGGCCAGCCAGAGCGTGGGCTCCAACCTGGCCTGGTACCAGCAGAAG |
| | | CCAGGACAGGGTCCCAGGCTGCTGATCTACGGAGCCTCCACTCGCGCG |
| | | ACCGGCATCCCCGCGAGGTTCTCCGGGTCGGGTTCCGGGACCGAGTTC |
| | | ACCCTGACCATCTCCTCCCTCCAACCGGAGGACTTCGCGGTGTACTAC |
| | | TGTCAGCAGTACAACGATTGGCTGCCCGTGACATTTGGACAGGGGACG |
| | | AAGGTGGAAATCAAAACCACTACCCCAGCACCGAGGCCACCCACCCCG |
| | | GCTCCTACCATCGCCTCCCAGCCTCTGTCCCTGCGTCCGGAGGCATGT |
| | | AGACCCGCAGCTGGTGGGGCCGTGCATACCCGGGGTCTTGACTTCGCC |
| | | TGCGATATCTACATTTGGGCCCCTCTGGCTGGTACTTGCGGGGTCCTG |
| | | CTGCTTTCACTCGTGATCACTCTTTACTGTAAGCGCGGTCGGAAGAAG |
| | | CTGCTGTACATCTTTAAGCAACCCTTCATGAGGCCTGTGCAGACTACT |
| | | CAAGAGGAGGACGGCTGTTCATGCCGGTTCCCAGAGGAGGAGGAAGGC |
| | | GGCTGCGAACTGCGCGTGAAATTCAGCCGCAGCGCAGATGCTCCAGCC |
| | | TACAAGCAGGGGCAGAACCAGCTCTACAACGAACTCAATCTTGGTCGG |
| | | AGAGAGGAGTACGACGTGCTGGACAAGCGGAGAGGACGGGACCCAGAA |
| | | ATGGGCGGGAAGCCGCGCAGAAAGAATCCCCAAGAGGGCCTGTACAAC |
| | | GAGCTCCAAAAGGATAAGATGGCAGAAGCCTATAGCGAGATTGGTATG |
| | | AAAGGGGAACGCAGAAGAGGCAAAGGCCACGACGGACTGTACCAGGGA |
| | | CTCAGCACCGCCACCAAGGACACCTATGACGCTCTTCACATGCAGGCC |
| | | CTGCCGCCTCGG |

139114

| | | |
|---|---|---|
| 139114-aa | 214 | EVQLVESGGGLVQPGGSLRLSCAVSGFALSNHGMSWVRRAPGKGLEWV |
| ScFv | | SGIVYSGSTYYAASVKGRFTISRDNSRNTLYLQMNSLRPEDTAIYYCS |
| domain | | AHGGESDVWGQGTTVTVSSASGGGGSGGRASGGGGSEIVLTQSPGTLS |
| | | LSPGERATLSCRASQSIGSSSLAWYQQKPGQAPRLLMYGASSRASGIP |
| | | DRFSGSGSGTDFTLTISRLEPEDFAVYYCQQYAGSPPFTFGQGTKVEI |
| | | K |
| 139114-nt | 215 | GAAGTGCAATTGGTGGAATCTGGTGGAGGACTTGTGCAACCTGGAGGA |
| ScFv | | TCACTGAGACTGTCATGCGCGGTGTCCGGTTTTGCCCTGAGCAATCAT |
| domain | | GGGATGTCGTGGGTCCGGCGCGCCCCCGGAAAGGGTCTGGAATGGGTG |
| | | TCGGGTATCGTCTACTCCGGGAGCACTTACTACGCCGCGAGCGTGAAG |
| | | GGCCGCTTCACCATTTCCCGCGATAACTCCCGCAACACCCTGTACTTG |
| | | CAAATGAACTCGCTCCGGCCTGAGGACACTGCCATCTACTACTGCTCC |
| | | GCACACGGAGGAGAATCCGACGTGTGGGGCCAGGGAACTACCGTGACC |
| | | GTCAGCAGCGCCTCCGGCGGCGGGGGCTCAGGCGGACGGGCTAGCGGC |
| | | GGCGGTGGCTCCGAGATCGTGCTGACCCAGTCGCCTGGCACTCTCTCG |
| | | CTGAGCCCCGGGGAAAGGGCAACCCTGTCCTGTCGGGCCAGCCAGTCC |
| | | ATTGGATCATCCTCCCTCGCCTGGTATCAGCAGAAACCGGGACAGGCT |
| | | CCGCGGCTGCTTATGTATGGGGCCAGCTCAAGAGCCTCCGGCATTCCC |
| | | GACCGGTTCTCCGGGTCCGGTTCCGGCACCGATTTCACCCTGACTATC |
| | | TCGAGGCTGGAGCCAGAGGACTTCGCCGTGTACTACTGCCAGCAGTAC |
| | | GCGGGGTCCCCGCCGTTCACGTTCGGACAGGGAACCAAGGTCGAGATC |
| | | AAG |
| 139114-aa | 216 | EVQLVESGGGLVQPGGSLRLSCAVSGFALSNHGMSWVRRAPGKGLEWV |
| VH | | SGIVYSGSTYYAASVKGRFTISRDNSRNTLYLQMNSLRPEDTAIYYCS |
| | | AHGGESDVWGQGTTVTVSS |
| 139114-aa | 217 | EIVLTQSPGTLSLSPGERATLSCRASQSIGSSSLAWYQQKPGQAPRLL |
| VL | | MYGASSRASGIPDRFSGSGSGTDFTLTISRLEPEDFAVYYCQQYAGSP |
| | | PFTFGQGTKVEIK |
| 139114-aa | 218 | MALPVTALLLPLALLLHAARPEVQLVESGGGLVQPGGSLRLSCAVSGF |
| Full CAR | | ALSNHGMSWVRRAPGKGLEWVSGIVYSGSTYYAASVKGRFTISRDNSR |
| | | NTLYLQMNSLRPEDTAIYYCSAHGGESDVWGQGTTVTVSSASGGGGSG |
| | | GRASGGGGSEIVLTQSPGTLSLSPGERATLSCRASQSIGSSSLAWYQQ |
| | | KPGQAPRLLMYGASSRASGIPDRFSGSGSGTDFTLTISRLEPEDFAVY |
| | | YCQQYAGSPPFTFGQGTKVEIKTTTPAPRPPTPAPTIASQPLSLRPEA |
| | | CRPAAGGAVHTRGLDFACDIYIWAPLAGTCGVLLLSLVITLYCKRGRK |
| | | KLLYIFKQPFMRPVQTTQEEDGCSCRFPEEEEGGCELRVKFSRSADAP |
| | | AYKQGQNQLYNELNLGRREEYDVLDKRRGRDPEMGGKPRRKNPQEGLY |
| | | NELQKDKMAEAYSEIGMKGERRRGKGHDGLYQGLSTATKDTYDALHMQ |
| | | ALPPR |
| 139114-nt | 219 | ATGGCCCTCCCTGTCACCGCCCTGCTGCTTCCGCTGGCTCTTCTGCTC |
| Full CAR | | CACGCCGCTCGGCCCGAAGTGCAATTGGTGGAATCTGGTGGAGGACTT |
| | | GTGCAACCTGGAGGATCACTGAGACTGTCATGCGCGGTGTCCGGTTTT |
| | | GCCCTGAGCAATCATGGGATGTCGTGGGTCCGGCGCGCCCCCGGAAAG |
| | | GGTCTGGAATGGGTGTCGGGTATCGTCTACTCCGGGAGCACTTACTAC |
| | | GCCGCGAGCGTGAAGGGCCGCTTCACCATTTCCCGCGATAACTCCCGC |
| | | AACACCCTGTACTTGCAAATGAACTCGCTCCGGCCTGAGGACACTGCC |
| | | ATCTACTACTGCTCCGCACACGGAGGAGAATCCGACGTGTGGGGCCAG |
| | | GGAACTACCGTGACCGTCAGCAGCGCCTCCGGCGGCGGGGGCTCAGGC |
| | | GGACGGGCTAGCGGCGGCGGTGGCTCCGAGATCGTGCTGACCCAGTCG |
| | | CCTGGCACTCTCTCGCTGAGCCCCGGGGAAAGGGCAACCCTGTCCTGT |
| | | CGGGCCAGCCAGTCCATTGGATCATCCTCCCTCGCCTGGTATCAGCAG |
| | | AAACCGGGACAGGCTCCGCGGCTGCTTATGTATGGGGCCAGCTCAAGA |
| | | GCCTCCGGCATTCCCGACCGGTTCTCCGGGTCCGGTTCCGGCACCGAT |
| | | TTCACCCTGACTATCTCGAGGCTGGAGCCAGAGGACTTCGCCGTGTAC |
| | | TACTGCCAGCAGTACGCGGGGTCCCCGCCGTTCACGTTCGGACAGGGA |
| | | ACCAAGGTCGAGATCAAGACCACTACCCCAGCACCGAGGCCACCCACC |
| | | CCGGCTCCTACCATCGCCTCCCAGCCTCTGTCCCTGCGTCCGGAGGCA |
| | | TGTAGACCCGCAGCTGGTGGGGCCGTGCATACCCGGGGTCTTGACTTC |
| | | GCCTGCGATATCTACATTTGGGCCCCTCTGGCTGGTACTTGCGGGGTC |
| | | CTGCTGCTTTCACTCGTGATCACTCTTTACTGTAAGCGCGGTCGGAAG |
| | | AAGCTGCTGTACATCTTTAAGCAACCCTTCATGAGGCCTGTGCAGACT |
| | | ACTCAAGAGGAGGACGGCTGTTCATGCCGGTTCCCAGAGGAGGAGGAA |
| | | GGCGGCTGCGAACTGCGCGTGAAATTCAGCCGCAGCGCAGATGCTCCA |
| | | GCCTACAAGCAGGGGCAGAACCAGCTCTACAACGAACTCAATCTTGGT |
| | | CGGAGAGAGGAGTACGACGTGCTGGACAAGCGGAGAGGACGGGACCCA |
| | | GAAATGGGCGGGAAGCCGCGCAGAAAGAATCCCCAAGAGGGCCTGTAC |
| | | AACGAGCTCCAAAAGGATAAGATGGCAGAAGCCTATAGCGAGATTGGT |
| | | ATGAAAGGGGAACGCAGAAGAGGCAAAGGCCACGACGGACTGTACCAG |
| | | GGACTCAGCACCGCCACCAAGGACACCTATGACGCTCTTCACATGCAG |
| | | GCCCTGCCGCCTCGG |

149362

| | | |
|---|---|---|
| 149362-aa | 220 | QVQLQESGPGLVKPSETLSLTCTVSGGSISSSYYYWGWIRQPPGKGLE |
| ScFv | | WIGSIYYSGSAYYNPSLKSRVTISVDTSKNQFSLRLSSVTAADTAVYY |
| domain | | CARHWQEWPDAFDIWGQGTMVTVSSGGGGSGGGGSGGGGSETTLTQSP |
| | | AFMSATPGDKVIISCKASQDIDDAMNWYQQKPGEAPLFIIQSATSPVP |
| | | GIPPRFSGSGFGTDFSLTINNIESEDAAYYFCLQHDNFPLTFGQGTKL |
| | | EIK |
| 149362-nt | 221 | CAAGTGCAGCTTCAGGAAAGCGGACCGGGCCTGGTCAAGCCATCCGAA |
| ScFv | | ACTCTCTCCCTGACTTGCACTGTGTCTGGCGGTTCCATCTCATCGTCG |
| domain | | TACTACTACTGGGGCTGGATTAGGCAGCCGCCCGGAAAGGGACTGGAG |
| | | TGGATCGGAAGCATCTACTATTCCGGCTCGGCGTACTACAACCCTAGC |
| | | CTCAAGTCGAGAGTGACCATCTCCGTGGATACCTCCAAGAACCAGTTT |
| | | TCCCTGCGCCTGAGCTCCGTGACCGCCGCTGACACCGCCGTGTACTAC |
| | | TGTGCTCGGCATTGGCAGGAATGGCCCGATGCCTTCGACATTTGGGGC |
| | | CAGGGCACTATGGTCACTGTGTCATCCGGGGGTGGAGGCAGCGGGGGA |
| | | GGAGGGTCCGGGGGGGGAGGTTCAGAGACAACCTTGACCCAGTCACCC |
| | | GCATTCATGTCCGCCACTCCGGGAGACAAGGTCATCATCTCGTGCAAA |
| | | GCGTCCCAGGATATCGACGATGCCATGAATTGGTACCAGCAGAAGCCT |
| | | GGCGAAGCGCCGCTGTTCATTATCCAATCCGCAACCTCGCCCGTGCCT |
| | | GGAATCCCACCGCGGTTCAGCGGCAGCGGTTTCGGAACCGACTTTTCC |
| | | CTGACCATTAACAACATTGAGTCCGAGGACGCCGCCTACTACTTCTGC |
| | | CTGCAACACGACAACTTCCCTCTCACGTTCGGCCAGGGAACCAAGCTG |
| | | GAAATCAAG |
| 149362-aa | 222 | QVQLQESGPGLVKPSETLSLTCTVSGGSISSSYYYWGWIRQPPGKGLE |
| VH | | WIGSIYYSGSAYYNPSLKSRVTISVDTSKNQFSLRLSSVTAADTAVYY |
| | | CARHWQEWPDAFDIWGQGTMVTVSS |
| 149362-aa | 223 | ETTLTQSPAFMSATPGDKVIISCKASQDIDDAMNWYQQKPGEAPLFII |
| VL | | QSATSPVPGIPPRFSGSGFGTDFSLTINNIESEDAAYYFCLQHDNFPL |
| | | TFGQGTKLEIK |
| 149362-aa | 224 | MALPVTALLLPLALLLHAARPQVQLQESGPGLVKPSETLSLTCTVSGG |
| Full CAR | | SISSSYYYWGWIRQPPGKGLEWIGSIYYSGSAYYNPSLKSRVTISVDT |
| | | SKNQFSLRLSSVTAADTAVYYCARHWQEWPDAFDIWGQGTMVTVSSGG |
| | | GGSGGGGSGGGGSETTLTQSPAFMSATPGDKVIISCKASQDIDDAMNW |
| | | YQQKPGEAPLFIIQSATSPVPGIPPRFSGSGFGTDFSLTINNIESEDA |
| | | AYYFCLQHDNFPLTFGQGTKLEIKTTTPAPRPPTPAPTIASQPLSLRP |
| | | EACRPAAGGAVHTRGLDFACDIYIWAPLAGTCGVLLLSLVITLYCKRG |
| | | RKKLLYIFKQPFMRPVQTTQEEDGCSCRFPEEEEGGCELRVKFSRSAD |
| | | APAYKQGQNQLYNELNLGRREEYDVLDKRRGRDPEMGGKPRRKNPQEG |
| | | LYNELQKDKMAEAYSEIGMKGERRRGKGHDGLYQGLSTATKDTYDALH |
| | | MQALPPR |
| 149362-nt | 225 | ATGGCCCTCCCTGTCACCGCCCTGCTGCTTCCGCTGGCTCTTCTGCTC |
| Full CAR | | CACGCCGCTCGGCCCCAAGTGCAGCTTCAGGAAAGCGGACCGGGCCTG |
| | | GTCAAGCCATCCGAAACTCTCTCCCTGACTTGCACTGTGTCTGGCGGT |
| | | TCCATCTCATCGTCGTACTACTACTGGGGCTGGATTAGGCAGCCGCCC |
| | | GGAAAGGGACTGGAGTGGATCGGAAGCATCTACTATTCCGGCTCGGCG |
| | | TACTACAACCCTAGCCTCAAGTCGAGAGTGACCATCTCCGTGGATACC |
| | | TCCAAGAACCAGTTTTCCCTGCGCCTGAGCTCCGTGACCGCCGCTGAC |
| | | ACCGCCGTGTACTACTGTGCTCGGCATTGGCAGGAATGGCCCGATGCC |
| | | TTCGACATTTGGGGCCAGGGCACTATGGTCACTGTGTCATCCGGGGGT |
| | | GGAGGCAGCGGGGGAGGAGGGTCCGGGGGGGGAGGTTCAGAGACAACC |
| | | TTGACCCAGTCACCCGCATTCATGTCCGCCACTCCGGGAGACAAGGTC |
| | | ATCATCTCGTGCAAAGCGTCCCAGGATATCGACGATGCCATGAATTGG |
| | | TACCAGCAGAAGCCTGGCGAAGCGCCGCTGTTCATTATCCAATCCGCA |
| | | ACCTCGCCCGTGCCTGGAATCCCACCGCGGTTCAGCGGCAGCGGTTTC |
| | | GGAACCGACTTTTCCCTGACCATTAACAACATTGAGTCCGAGGACGCC |
| | | GCCTACTACTTCTGCCTGCAACACGACAACTTCCCTCTCACGTTCGGC |
| | | CAGGGAACCAAGCTGGAAATCAAGACCACTACCCCAGCACCGAGGCCA |
| | | CCCACCCCGGCTCCTACCATCGCCTCCCAGCCTCTGTCCCTGCGTCCG |
| | | GAGGCATGTAGACCCGCAGCTGGTGGGGCCGTGCATACCCGGGGTCTT |
| | | GACTTCGCCTGCGATATCTACATTTGGGCCCCTCTGGCTGGTACTTGC |
| | | GGGGTCCTGCTGCTTTCACTCGTGATCACTCTTTACTGTAAGCGCGGT |
| | | CGGAAGAAGCTGCTGTACATCTTTAAGCAACCCTTCATGAGGCCTGTG |
| | | CAGACTACTCAAGAGGAGGACGGCTGTTCATGCCGGTTCCCAGAGGAG |
| | | GAGGAAGGCGGCTGCGAACTGCGCGTGAAATTCAGCCGCAGCGCAGAT |
| | | GCTCCAGCCTACAAGCAGGGGCAGAACCAGCTCTACAACGAACTCAAT |
| | | CTTGGTCGGAGAGAGGAGTACGACGTGCTGGACAAGCGGAGAGGACGG |
| | | GACCCAGAAATGGGCGGGAAGCCGCGCAGAAAGAATCCCCAAGAGGGC |
| | | CTGTACAACGAGCTCCAAAAGGATAAGATGGCAGAAGCCTATAGCGAG |
| | | ATTGGTATGAAAGGGGAACGCAGAAGAGGCAAAGGCCACGACGGACTG |
| | | TACCAGGGACTCAGCACCGCCACCAAGGACACCTATGACGCTCTTCAC |
| | | ATGCAGGCCCTGCCGCCTCGG |

149363

| | | |
|---|---|---|
| 149363-aa | 226 | VNLRESGPALVKPTQTLTLTCTFSGFSLRTSGMCVSWIRQPPGKALEW |
| ScFv | | LARIDWDEDKFYSTSLKTRLTISKDTSDNQVVLRMTNMDPADTATYYC |
| domain | | ARSGAGGTSATAFDIWGPGTMVTVSSGGGGSGGGGSGGGGSDIQMTQS |
| | | PSSLSASVGDRVTITCRASQDIYNNLAWFQLKPGSAPRSLMYAANKSQ |
| | | SGVPSRFSGSASGTDFTLTISSLQPEDFATYYCQHYYRFPYSFGQGTK |
| | | LEIK |
| 149363-nt | 227 | CAAGTCAATCTGCGCGAATCCGGCCCCGCCTTGGTCAAGCCTACCCAG |
| ScFv | | ACCCTCACTCTGACCTGTACTTTCTCCGGCTTCTCCCTGCGGACTTCC |
| domain | | GGGATGTGCGTGTCCTGGATCAGACAGCCTCCGGGAAAGGCCCTGGAG |
| | | TGGCTCGCTCGCATTGACTGGGATGAGGACAAGTTCTACTCCACCTCA |
| | | CTCAAGACCAGGCTGACCATCAGCAAAGATACCTCTGACAACCAAGTG |
| | | GTGCTCCGCATGACCAACATGGACCCAGCCGACACTGCCACTTACTAC |
| | | TGCGCGAGGAGCGGAGCGGGCGGAACCTCCGCCACCGCCTTCGATATT |
| | | TGGGGCCCGGGTACCATGGTCACCGTGTCAAGCGGAGGAGGGGGGTCC |
| | | GGGGGCGGCGGTTCCGGGGGAGGCGGATCGGACATTCAGATGACTCAG |
| | | TCACCATCGTCCCTGAGCGCTAGCGTGGGCGACAGAGTGACAATCACT |
| | | TGCCGGGCATCCCAGGACATCTATAACAACCTTGCGTGGTTCCAGCTG |
| | | AAGCCTGGTTCCGCACCGCGGTCACTTATGTACGCCGCCAACAAGAGC |
| | | CAGTCGGGAGTGCCGTCCCGGTTTTCCGGTTCGGCCTCGGGAACTGAC |
| | | TTCACCCTGACGATCTCCAGCCTGCAACCCGAGGATTTCGCCACCTAC |
| | | TACTGCCAGCACTACTACCGCTTTCCCTACTCGTTCGGACAGGGAACC |
| | | AAGCTGGAAATCAAG |
| 149363-aa | 228 | QVNLRESGPALVKPTQTLTLTCTFSGFSLRTSGMCVSWIRQPPGKALE |
| VH | | WLARIDWDEDKFYSTSLKTRLTISKDTSDNQVVLRMTNMDPADTATYY |
| | | CARSGAGGTSATAFDIWGPGTMVTVSS |
| 149363-aa | 229 | DIQMTQSPSSLSASVGDRVTITCRASQDIYNNLAWFQLKPGSAPRSLM |
| VL | | YAANKSQSGVPSRFSGSASGTDFTLTISSLQPEDFATYYCQHYYRFPY |
| | | SFGQGTKLEIK |
| 149363-aa | 230 | MALPVTALLLPLALLLHAARPQVNLRESGPALVKPTQTLTLTCTFSGF |
| Full CAR | | SLRTSGMCVSWIRQPPGKALEWLARIDWDEDKFYSTSLKTRLTISKDT |
| | | SDNQVVLRMTNMDPADTATYYCARSGAGGTSATAFDIWGPGTMVTVSS |
| | | GGGGSGGGGSGGGGSDIQMTQSPSSLSASVGDRVTITCRASQDIYNNL |
| | | AWFQLKPGSAPRSLMYAANKSQSGVPSRFSGSASGTDFTLTISSLQPE |
| | | DFATYYCQHYYRFPYSFGQGTKLEIKTTTPAPRPPTPAPTIASQPLSL |
| | | RPEACRPAAGGAVHTRGLDFACDIYIWAPLAGTCGVLLLSLVITLYCK |
| | | RGRKKLLYIFKQPFMRPVQTTQEEDGCSCRFPEEEEGGCELRVKFSRS |
| | | ADAPAYKQGQNQLYNELNLGRREEYDVLDKRRGRDPEMGGKPRRKNPQ |
| | | EGLYNELQKDKMAEAYSEIGMKGERRRGKGHDGLYQGLSTATKDTYDA |
| | | LHMQALPPR |
| 149363-nt | 231 | ATGGCCCTCCCTGTCACCGCCCTGCTGCTTCCGCTGGCTCTTCTGCTC |
| Full CAR | | CACGCCGCTCGGCCCCAAGTCAATCTGCGCGAATCCGGCCCCGCCTTG |
| | | GTCAAGCCTACCCAGACCCTCACTCTGACCTGTACTTTCTCCGGCTTC |
| | | TCCCTGCGGACTTCCGGGATGTGCGTGTCCTGGATCAGACAGCCTCCG |
| | | GGAAAGGCCCTGGAGTGGCTCGCTCGCATTGACTGGGATGAGGACAAG |
| | | TTCTACTCCACCTCACTCAAGACCAGGCTGACCATCAGCAAAGATACC |
| | | TCTGACAACCAAGTGGTGCTCCGCATGACCAACATGGACCCAGCCGAC |
| | | ACTGCCACTTACTACTGCGCGAGGAGCGGAGCGGGCGGAACCTCCGCC |
| | | ACCGCCTTCGATATTTGGGGCCCGGGTACCATGGTCACCGTGTCAAGC |
| | | GGAGGAGGGGGGTCCGGGGGCGGCGGTTCCGGGGGAGGCGGATCGGAC |
| | | ATTCAGATGACTCAGTCACCATCGTCCCTGAGCGCTAGCGTGGGCGAC |
| | | AGAGTGACAATCACTTGCCGGGCATCCCAGGACATCTATAACAACCTT |
| | | GCGTGGTTCCAGCTGAAGCCTGGTTCCGCACCGCGGTCACTTATGTAC |
| | | GCCGCCAACAAGAGCCAGTCGGGAGTGCCGTCCCGGTTTTCCGGTTCG |
| | | GCCTCGGGAACTGACTTCACCCTGACGATCTCCAGCCTGCAACCCGAG |
| | | GATTTCGCCACCTACTACTGCCAGCACTACTACCGCTTTCCCTACTCG |
| | | TTCGGACAGGGAACCAAGCTGGAAATCAAGACCACTACCCCAGCACCG |
| | | AGGCCACCCACCCCGGCTCCTACCATCGCCTCCCAGCCTCTGTCCCTG |
| | | CGTCCGGAGGCATGTAGACCCGCAGCTGGTGGGGCCGTGCATACCCGG |
| | | GGTCTTGACTTCGCCTGCGATATCTACATTTGGGCCCCTCTGGCTGGT |
| | | ACTTGCGGGGTCCTGCTGCTTTCACTCGTGATCACTCTTTACTGTAAG |
| | | CGCGGTCGGAAGAAGCTGCTGTACATCTTTAAGCAACCCTTCATGAGG |
| | | CCTGTGCAGACTACTCAAGAGGAGGACGGCTGTTCATGCCGGTTCCCA |
| | | GAGGAGGAGGAAGGCGGCTGCGAACTGCGCGTGAAATTCAGCCGCAGC |
| | | GCAGATGCTCCAGCCTACAAGCAGGGGCAGAACCAGCTCTACAACGAA |
| | | CTCAATCTTGGTCGGAGAGAGGAGTACGACGTGCTGGACAAGCGGAGA |
| | | GGACGGGACCCAGAAATGGGCGGGAAGCCGCGCAGAAAGAATCCCCAA |
| | | GAGGGCCTGTACAACGAGCTCCAAAAGGATAAGATGGCAGAAGCCTAT |
| | | AGCGAGATTGGTATGAAAGGGGAACGCAGAAGAGGCAAAGGCCACGAC |
| | | GGACTGTACCAGGGACTCAGCACCGCCACCAAGGACACCTATGACGCT |
| | | CTTCACATGCAGGCCCTGCCGCCTCGG |

149364

| | | |
|---|---|---|
| 149364-aa | 232 | EVQLVESGGGLVKPGGSLRLSCAASGFTFSSYSMNWVRQAPGKGLEWV |
| ScFv | | SSISSSSSYIYYADSVKGRFTISRDNAKNSLYLQMNSLRAEDTAVYYC |
| domain | | AKTIAAVYAFDIWGQGTTVTVSSGGGGSGGGGSGGGGSEIVLTQSPLS |
| | | LPVTPEEPASISCRSSQSLLHSNGYNYLDWYLQKPGQSPQLLIYLGSN |
| | | RASGVPDRFSGSGSGTDFTLKISRVEAEDVGVYYCMQALQTPYTFGQG |
| | | TKLEIK |
| 149364-nt | 233 | GAAGTGCAGCTTGTCGAATCCGGGGGGGGACTGGTCAAGCCGGGCGGA |
| ScFv | | TCACTGAGACTGTCCTGCGCCGCGAGCGGCTTCACGTTCTCCTCCTAC |
| domain | | TCCATGAACTGGGTCCGCCAAGCCCCCGGGAAGGGACTGGAATGGGTG |
| | | TCCTCTATCTCCTCGTCGTCGTCCTACATCTACTACGCCGACTCCGTG |
| | | AAGGGAAGATTCACCATTTCCCGCGACAACGCAAAGAACTCACTGTAC |
| | | TTGCAAATGAACTCACTCCGGGCCGAAGATACTGCTGTGTACTATTGC |
| | | GCCAAGACTATTGCCGCCGTCTACGCTTTCGACATCTGGGGCCAGGGA |
| | | ACCACCGTGACTGTGTCGTCCGGTGGTGGTGGCTCGGGCGGAGGAGGA |
| | | AGCGGCGGCGGGGGGTCCGAGATTGTGCTGACCCAGTCGCCACTGAGC |
| | | CTCCCTGTGACCCCCGAGGAACCCGCCAGCATCAGCTGCCGGTCCAGC |
| | | CAGTCCCTGCTCCACTCCAACGGATACAATTACCTCGATTGGTACCTT |
| | | CAGAAGCCTGGACAAAGCCCGCAGCTGCTCATCTACTTGGGATCAAAC |
| | | CGCGCGTCAGGAGTGCCTGACCGGTTCTCCGGCTCGGGCAGCGGTACC |
| | | GATTTCACCCTGAAAATCTCCAGGGTGGAGGCAGAGGACGTGGGAGTG |
| | | TATTACTGTATGCAGGCGCTGCAGACTCCGTACACATTTGGGCAGGGC |
| | | ACCAAGCTGGAGATCAAG |
| 149364-aa | 234 | EVQLVESGGGLVKPGGSLRLSCAASGFTFSSYSMNWVRQAPGKGLEWV |
| VH | | SSISSSSSYIYYADSVKGRFTISRDNAKNSLYLQMNSLRAEDTAVYYC |
| | | AKTIAAVYAFDIWGQGTTVTVSS |
| 149364-aa | 235 | EIVLTQSPLSLPVTPEEPASISCRSSQSLLHSNGYNYLDWYLQKPGQS |
| VL | | PQLLIYLGSNRASGVPDRFSGSGSGTDFTLKISRVEAEDVGVYYCMQA |
| | | LQTPYTFGQGTKLEIK |
| 149364-aa | 236 | MALPVTALLLPLALLLHAARPEVQLVESGGGLVKPGGSLRLSCAASGF |
| Full CAR | | TFSSYSMNWVRQAPGKGLEWVSSISSSSSYIYYADSVKGRFTISRDNA |
| | | KNSLYLQMNSLRAEDTAVYYCAKTIAAVYAFDIWGQGTTVTVSSGGGG |
| | | SGGGGSGGGGSEIVLTQSPLSLPVTPEEPASISCRSSQSLLHSNGYNY |
| | | LDWYLQKPGQSPQLLIYLGSNRASGVPDRFSGSGSGTDFTLKISRVEA |
| | | EDVGVYYCMQALQTPYTFGQGTKLEIKTTTPAPRPPTPAPTIASQPLS |
| | | LRPEACRPAAGGAVHTRGLDFACDIYIWAPLAGTCGVLLLSLVITLYC |
| | | KRGRKKLLYIFKQPFMRPVQTTQEEDGCSCRFPEEEEGGCELRVKFSR |
| | | SADAPAYKQGQNQLYNELNLGRREEYDVLDKRRGRDPEMGGKPRRKNP |
| | | QEGLYNELQKDKMAEAYSEIGMKGERRRGKGHDGLYQGLSTATKDTYD |
| | | ALHMQALPPR |
| 149364-nt | 237 | ATGGCCCTCCCTGTCACCGCCCTGCTGCTTCCGCTGGCTCTTCTGCTC |
| Full CAR | | CACGCCGCTCGGCCCGAAGTGCAGCTTGTCGAATCCGGGGGGGGACTG |
| | | GTCAAGCCGGGCGGATCACTGAGACTGTCCTGCGCCGCGAGCGGCTTC |
| | | ACGTTCTCCTCCTACTCCATGAACTGGGTCCGCCAAGCCCCCGGGAAG |
| | | GGACTGGAATGGGTGTCCTCTATCTCCTCGTCGTCGTCCTACATCTAC |
| | | TACGCCGACTCCGTGAAGGGAAGATTCACCATTTCCCGCGACAACGCA |
| | | AAGAACTCACTGTACTTGCAAATGAACTCACTCCGGGCCGAAGATACT |
| | | GCTGTGTACTATTGCGCCAAGACTATTGCCGCCGTCTACGCTTTCGAC |
| | | ATCTGGGGCCAGGGAACCACCGTGACTGTGTCGTCCGGTGGTGGTGGC |
| | | TCGGGCGGAGGAGGAAGCGGCGGCGGGGGGTCCGAGATTGTGCTGACC |
| | | CAGTCGCCACTGAGCCTCCCTGTGACCCCCGAGGAACCCGCCAGCATC |
| | | AGCTGCCGGTCCAGCCAGTCCCTGCTCCACTCCAACGGATACAATTAC |
| | | CTCGATTGGTACCTTCAGAAGCCTGGACAAAGCCCGCAGCTGCTCATC |
| | | TACTTGGGATCAAACCGCGCGTCAGGAGTGCCTGACCGGTTCTCCGGC |
| | | TCGGGCAGCGGTACCGATTTCACCCTGAAAATCTCCAGGGTGGAGGCA |
| | | GAGGACGTGGGAGTGTATTACTGTATGCAGGCGCTGCAGACTCCGTAC |
| | | ACATTTGGGCAGGGCACCAAGCTGGAGATCAAGACCACTACCCCAGCA |
| | | CCGAGGCCACCCACCCCGGCTCCTACCATCGCCTCCCAGCCTCTGTCC |
| | | CTGCGTCCGGAGGCATGTAGACCCGCAGCTGGTGGGGCCGTGCATACC |
| | | CGGGGTCTTGACTTCGCCTGCGATATCTACATTTGGGCCCCTCTGGCT |
| | | GGTACTTGCGGGGTCCTGCTGCTTTCACTCGTGATCACTCTTTACTGT |
| | | AAGCGCGGTCGGAAGAAGCTGCTGTACATCTTTAAGCAACCCTTCATG |
| | | AGGCCTGTGCAGACTACTCAAGAGGAGGACGGCTGTTCATGCCGGTTC |
| | | CCAGAGGAGGAGGAAGGCGGCTGCGAACTGCGCGTGAAATTCAGCCGC |
| | | AGCGCAGATGCTCCAGCCTACAAGCAGGGGCAGAACCAGCTCTACAAC |
| | | GAACTCAATCTTGGTCGGAGAGAGGAGTACGACGTGCTGGACAAGCGG |
| | | AGAGGACGGGACCCAGAAATGGGCGGGAAGCCGCGCAGAAAGAATCCC |
| | | CAAGAGGGCCTGTACAACGAGCTCCAAAAGGATAAGATGGCAGAAGCC |
| | | TATAGCGAGATTGGTATGAAAGGGGAACGCAGAAGAGGCAAAGGCCAC |
| | | GACGGACTGTACCAGGGACTCAGCACCGCCACCAAGGACACCTATGAC |
| | | GCTCTTCACATGCAGGCCCTGCCGCCTCGG |

149365

| | | |
|---|---|---|
| 149365-aa | 238 | EVQLVESGGGLVKPGGSLRLSCAASGFTFSDYYMSWIRQAPGKGLEWV |
| ScFv | | SYISSSGSTIYYADSVKGRFTISRDNAKNSLYLQMNSLRAEDTAVYYC |
| domain | | ARDLRGAFDIWGQGTMVTVSSGGGGSGGGGSGGGGSSYVLTQSPSVSA |
| | | APGYTATISCGGNNIGTKSVHWYQQKPGQAPLLVIRDDSVRPSKIPGR |
| | | FSGSNSGNMATLTISGVQAGDEADFYCQVWDSDSEHVVFGGGTKLTVL |
| 149365-nt | 239 | GAAGTCCAGCTCGTGGAGTCCGGCGGAGGCCTTGTGAAGCCTGGAGGT |
| ScFv | | TCGCTGAGACTGTCCTGCGCCGCCTCCGGCTTCACCTTCTCCGACTAC |
| domain | | TACATGTCCTGGATCAGACAGGCCCCGGGAAAGGGCCTGGAATGGGTG |
| | | TCCTACATCTCGTCATCGGGCAGCACTATCTACTACGCGGACTCAGTG |
| | | AAGGGGCGGTTCACCATTTCCCGGGATAACGCGAAGAACTCGCTGTAT |
| | | CTGCAAATGAACTCACTGAGGGCCGAGGACACCGCCGTGTACTACTGC |
| | | GCCCGCGATCTCCGCGGGGCATTTGACATCTGGGGACAGGGAACCATG |
| | | GTCACAGTGTCCAGCGGAGGGGGAGGATCGGGTGGCGGAGGTTCCGGG |
| | | GGTGGAGGCTCCTCCTACGTGCTGACTCAGAGCCCAAGCGTCAGCGCT |
| | | GCGCCCGGTTACACGGCAACCATCTCCTGTGGCGGAAACAACATTGGG |
| | | ACCAAGTCTGTGCACTGGTATCAGCAGAAGCCGGGCCAAGCTCCCCTG |
| | | TTGGTGATCCGCGATGACTCCGTGCGGCCTAGCAAAATTCCGGGACGG |
| | | TTCTCCGGCTCCAACAGCGGCAATATGGCCACTCTCACCATCTCGGGA |
| | | GTGCAGGCCGGAGATGAAGCCGACTTCTACTGCCAAGTCTGGGACTCA |
| | | GACTCCGAGCATGTGGTGTTCGGGGGCGGAACCAAGCTGACTGTGCTC |
| 149365-aa | 240 | EVQLVESGGGLVKPGGSLRLSCAASGFTFSDYYMSWIRQAPGKGLEWV |
| VH | | SYISSSGSTIYYADSVKGRFTISRDNAKNSLYLQMNSLRAEDTAVYYC |
| | | ARDLRGAFDIWGQGTMVTVSS |
| 149365-aa | 241 | SYVLTQSPSVSAAPGYTATISCGGNNIGTKSVHWYQQKPGQAPLLVIR |
| VL | | DDSVRPSKIPGRFSGSNSGNMATLTISGVQAGDEADFYCQVWDSDSEH |
| | | VVFGGGTKLTVL |
| 149365-aa | 242 | MALPVTALLLPLALLLHAARPEVQLVESGGGLVKPGGSLRLSCAASGF |
| Full CAR | | TFSDYYMSWIRQAPGKGLEWVSYISSSGSTIYYADSVKGRFTISRDNA |
| | | KNSLYLQMNSLRAEDTAVYYCARDLRGAFDIWGQGTMVTVSSGGGGSG |
| | | GGGSGGGGSSYVLTQSPSVSAAPGYTATISCGGNNIGTKSVHWYQQKP |
| | | GQAPLLVIRDDSVRPSKIPGRFSGSNSGNMATLTISGVQAGDEADFYC |
| | | QVWDSDSEHVVFGGGTKLTVLTTTPAPRPPTPAPTIASQPLSLRPEAC |
| | | RPAAGGAVHTRGLDFACDIYIWAPLAGTCGVLLLSLVITLYCKRGRKK |
| | | LLYIFKQPFMRPVQTTQEEDGCSCRFPEEEEGGCELRVKFSRSADAPA |
| | | YKQGQNQLYNELNLGRREEYDVLDKRRGRDPEMGGKPRRKNPQEGLYN |
| | | ELQKDKMAEAYSEIGMKGERRRGKGHDGLYQGLSTATKDTYDALHMQA |
| | | LPPR |
| 149365-nt | 243 | ATGGCCCTCCCTGTCACCGCCCTGCTGCTTCCGCTGGCTCTTCTGCTC |
| Full CAR | | CACGCCGCTCGGCCCGAAGTCCAGCTCGTGGAGTCCGGCGGAGGCCTT |
| | | GTGAAGCCTGGAGGTTCGCTGAGACTGTCCTGCGCCGCCTCCGGCTTC |
| | | ACCTTCTCCGACTACTACATGTCCTGGATCAGACAGGCCCCGGGAAAG |
| | | GGCCTGGAATGGGTGTCCTACATCTCGTCATCGGGCAGCACTATCTAC |
| | | TACGCGGACTCAGTGAAGGGGCGGTTCACCATTTCCCGGGATAACGCG |
| | | AAGAACTCGCTGTATCTGCAAATGAACTCACTGAGGGCCGAGGACACC |
| | | GCCGTGTACTACTGCGCCCGCGATCTCCGCGGGGCATTTGACATCTGG |
| | | GGACAGGGAACCATGGTCACAGTGTCCAGCGGAGGGGGAGGATCGGGT |
| | | GGCGGAGGTTCCGGGGGTGGAGGCTCCTCCTACGTGCTGACTCAGAGC |
| | | CCAAGCGTCAGCGCTGCGCCCGGTTACACGGCAACCATCTCCTGTGGC |
| | | GGAAACAACATTGGGACCAAGTCTGTGCACTGGTATCAGCAGAAGCCG |
| | | GGCCAAGCTCCCCTGTTGGTGATCCGCGATGACTCCGTGCGGCCTAGC |
| | | AAAATTCCGGGACGGTTCTCCGGCTCCAACAGCGGCAATATGGCCACT |
| | | CTCACCATCTCGGGAGTGCAGGCCGGAGATGAAGCCGACTTCTACTGC |
| | | CAAGTCTGGGACTCAGACTCCGAGCATGTGGTGTTCGGGGGCGGAACC |
| | | AAGCTGACTGTGCTCACCACTACCCCAGCACCGAGGCCACCCACCCCG |
| | | GCTCCTACCATCGCCTCCCAGCCTCTGTCCCTGCGTCCGGAGGCATGT |
| | | AGACCCGCAGCTGGTGGGGCCGTGCATACCCGGGGTCTTGACTTCGCC |
| | | TGCGATATCTACATTTGGGCCCCTCTGGCTGGTACTTGCGGGGTCCTG |
| | | CTGCTTTCACTCGTGATCACTCTTTACTGTAAGCGCGGTCGGAAGAAG |
| | | CTGCTGTACATCTTTAAGCAACCCTTCATGAGGCCTGTGCAGACTACT |
| | | CAAGAGGAGGACGGCTGTTCATGCCGGTTCCCAGAGGAGGAGGAAGGC |
| | | GGCTGCGAACTGCGCGTGAAATTCAGCCGCAGCGCAGATGCTCCAGCC |
| | | TACAAGCAGGGGCAGAACCAGCTCTACAACGAACTCAATCTTGGTCGG |
| | | AGAGAGGAGTACGACGTGCTGGACAAGCGGAGAGGACGGGACCCAGAA |
| | | ATGGGCGGGAAGCCGCGCAGAAAGAATCCCCAAGAGGGCCTGTACAAC |
| | | GAGCTCCAAAAGGATAAGATGGCAGAAGCCTATAGCGAGATTGGTATG |
| | | AAAGGGGAACGCAGAAGAGGCAAAGGCCACGACGGACTGTACCAGGGA |
| | | CTCAGCACCGCCACCAAGGACACCTATGACGCTCTTCACATGCAGGCC |
| | | CTGCCGCCTCGG |

149366

| | | |
|---|---|---|
| 149366-aa | 244 | QVQLVQSGAEVKKPGASVKVSCKPSGYTVTSHYIHWVRRAPGQGLEWM |
| ScFv | | GMINPSGGVTAYSQTLQGRVTMTSDTSSSTVYMELSSLRSEDTAMYYC |
| domain | | AREGSGSGWYFDFWGRGTLVTVSSGGGGSGGGGSGGGGSSYVLTQPPS |
| | | VSVSPGQTASITCSGDGLSKKYVSWYQQKAGQSPVVLISRDKERPSGI |
| | | PDRFSGSNSADTATLTISGTQAMDEADYYCQAWDDTTVVFGGGTKLTV |
| | | L |
| 149366-nt | 245 | CAAGTGCAGCTGGTGCAGAGCGGGGCCGAAGTCAAGAAGCCGGGAGCC |
| ScFv | | TCCGTGAAAGTGTCCTGCAAGCCTTCGGGATACACCGTGACCTCCCAC |
| domain | | TACATTCATTGGGTCCGCCGCGCCCCCGGCCAAGGACTCGAGTGGATG |
| | | GGCATGATCAACCCTAGCGGCGGAGTGACCGCGTACAGCCAGACGCTG |
| | | CAGGGACGCGTGACTATGACCTCGGATACCTCCTCCTCCACCGTCTAT |
| | | ATGGAACTGTCCAGCCTGCGGTCCGAGGATACCGCCATGTACTACTGC |
| | | GCCCGGGAAGGATCAGGCTCCGGGTGGTATTTCGACTTCTGGGGAAGA |
| | | GGCACCCTCGTGACTGTGTCATCTGGGGGAGGGGGTTCCGGTGGTGGC |
| | | GGATCGGGAGGAGGCGGTTCATCCTACGTGCTGACCCAGCCACCCTCC |
| | | GTGTCCGTGAGCCCCGGCCAGACTGCATCGATTACATGTAGCGGCGAC |
| | | GGCCTCTCCAAGAAATACGTGTCGTGGTACCAGCAGAAGGCCGGACAG |
| | | AGCCCGGTGGTGCTGATCTCAAGAGATAAGGAGCGGCCTAGCGGAATC |
| | | CCGGACAGGTTCTCGGGTTCCAACTCCGCGGACACTGCTACTCTGACC |
| | | ATCTCGGGGACCCAGGCTATGGACGAAGCCGATTACTACTGCCAAGCC |
| | | TGGGACGACACTACTGTCGTGTTTGGAGGGGGCACCAAGTTGACCGTC |
| | | CTT |
| 149366-aa | 246 | QVQLVQSGAEVKKPGASVKVSCKPSGYTVTSHYIHWVRRAPGQGLEWM |
| VH | | GMINPSGGVTAYSQTLQGRVTMTSDTSSSTVYMELSSLRSEDTAMYYC |
| | | AREGSGSGWYFDFWGRGTLVTVSS |
| 149366-aa | 247 | SYVLTQPPSVSVSPGQTASITCSGDGLSKKYVSWYQQKAGQSPVVLIS |
| VL | | RDKERPSGIPDRFSGSNSADTATLTISGTQAMDEADYYCQAWDDTTVV |
| | | FGGGTKLTVL |
| 149366-aa | 248 | MALPVTALLLPLALLLHAARPQVQLVQSGAEVKKPGASVKVSCKPSGY |
| Full CAR | | TVTSHYIHWVRRAPGQGLEWMGMINPSGGVTAYSQTLQGRVTMTSDTS |
| | | SSTVYMELSSLRSEDTAMYYCAREGSGSGWYFDFWGRGTLVTVSSGGG |
| | | GSGGGGSGGGGSSYVLTQPPSVSVSPGQTASITCSGDGLSKKYVSWYQ |
| | | QKAGQSPVVLISRDKERPSGIPDRFSGSNSADTATLTISGTQAMDEAD |
| | | YYCQAWDDTTVVFGGGTKLTVLTTTPAPRPPTPAPTIASQPLSLRPEA |
| | | CRPAAGGAVHTRGLDFACDIYIWAPLAGTCGVLLLSLVITLYCKRGRK |
| | | KLLYIFKQPFMRPVQTTQEEDGCSCRFPEEEEGGCELRVKFSRSADAP |
| | | AYKQGQNQLYNELNLGRREEYDVLDKRRGRDPEMGGKPRRKNPQEGLY |
| | | NELQKDKMAEAYSEIGMKGERRRGKGHDGLYQGLSTATKDTYDALHMQ |
| | | ALPPR |
| 149366-nt | 249 | ATGGCCCTCCCTGTCACCGCCCTGCTGCTTCCGCTGGCTCTTCTGCTC |
| Full CAR | | CACGCCGCTCGGCCCCAAGTGCAGCTGGTGCAGAGCGGGGCCGAAGTC |
| | | AAGAAGCCGGGAGCCTCCGTGAAAGTGTCCTGCAAGCCTTCGGGATAC |
| | | ACCGTGACCTCCCACTACATTCATTGGGTCCGCCGCGCCCCCGGCCAA |
| | | GGACTCGAGTGGATGGGCATGATCAACCCTAGCGGCGGAGTGACCGCG |
| | | TACAGCCAGACGCTGCAGGGACGCGTGACTATGACCTCGGATACCTCC |
| | | TCCTCCACCGTCTATATGGAACTGTCCAGCCTGCGGTCCGAGGATACC |
| | | GCCATGTACTACTGCGCCCGGGAAGGATCAGGCTCCGGGTGGTATTTC |
| | | GACTTCTGGGGAAGAGGCACCCTCGTGACTGTGTCATCTGGGGGAGGG |
| | | GGTTCCGGTGGTGGCGGATCGGGAGGAGGCGGTTCATCCTACGTGCTG |
| | | ACCCAGCCACCCTCCGTGTCCGTGAGCCCCGGCCAGACTGCATCGATT |
| | | ACATGTAGCGGCGACGGCCTCTCCAAGAAATACGTGTCGTGGTACCAG |
| | | CAGAAGGCCGGACAGAGCCCGGTGGTGCTGATCTCAAGAGATAAGGAG |
| | | CGGCCTAGCGGAATCCCGGACAGGTTCTCGGGTTCCAACTCCGCGGAC |
| | | ACTGCTACTCTGACCATCTCGGGGACCCAGGCTATGGACGAAGCCGAT |
| | | TACTACTGCCAAGCCTGGGACGACACTACTGTCGTGTTTGGAGGGGGC |
| | | ACCAAGTTGACCGTCCTTACCACTACCCCAGCACCGAGGCCACCCACC |
| | | CCGGCTCCTACCATCGCCTCCCAGCCTCTGTCCCTGCGTCCGGAGGCA |
| | | TGTAGACCCGCAGCTGGTGGGGCCGTGCATACCCGGGGTCTTGACTTC |
| | | GCCTGCGATATCTACATTTGGGCCCCTCTGGCTGGTACTTGCGGGGTC |
| | | CTGCTGCTTTCACTCGTGATCACTCTTTACTGTAAGCGCGGTCGGAAG |
| | | AAGCTGCTGTACATCTTTAAGCAACCCTTCATGAGGCCTGTGCAGACT |
| | | ACTCAAGAGGAGGACGGCTGTTCATGCCGGTTCCCAGAGGAGGAGGAA |
| | | GGCGGCTGCGAACTGCGCGTGAAATTCAGCCGCAGCGCAGATGCTCCA |
| | | GCCTACAAGCAGGGGCAGAACCAGCTCTACAACGAACTCAATCTTGGT |
| | | CGGAGAGAGGAGTACGACGTGCTGGACAAGCGGAGAGGACGGGACCCA |
| | | GAAATGGGCGGGAAGCCGCGCAGAAAGAATCCCCAAGAGGGCCTGTAC |
| | | AACGAGCTCCAAAAGGATAAGATGGCAGAAGCCTATAGCGAGATTGGT |
| | | ATGAAAGGGGAACGCAGAAGAGGCAAAGGCCACGACGGACTGTACCAG |
| | | GGACTCAGCACCGCCACCAAGGACACCTATGACGCTCTTCACATGCAG |
| | | GCCCTGCCGCCTCGG |

149367

| | | |
|---|---|---|
| 149367-aa | 250 | QVQLQESGPGLVKPSQTLSLTCTVSGGSISSGGYYWSWIRQHPGKGLE |
| ScFv | | WIGYIYYSGSTYYNPSLKSRVTISVDTSKNQFSLKLSSVTAADTAVYY |
| domain | | CARAGIAARLRGAFDIWGQGTMVTVSSGGGGSGGGGSGGGGSDIVMTQ |
| | | SPSSVSASVGDRVIITCRASQGIRNWLAWYQQKPGKAPNLLIYAASNL |
| | | QSGVPSRFSGSGSGADFTLTISSLQPEDVATYYCQKYNSAPFTFGPGT |
| | | KVDIK |
| 149367-nt | 251 | CAAGTGCAGCTTCAGGAGAGCGGCCCGGGACTCGTGAAGCCGTCCCAG |
| ScFv | | ACCCTGTCCCTGACTTGCACCGTGTCGGGAGGAAGCATCTCGAGCGGA |
| domain | | GGCTACTATTGGTCGTGGATTCGGCAGCACCCTGGAAAGGGCCTGGAA |
| | | TGGATCGGCTACATCTACTACTCCGGCTCGACCTACTACAACCCATCG |
| | | CTGAAGTCCAGAGTGACAATCTCAGTGGACACGTCCAAGAATCAGTTC |
| | | AGCCTGAAGCTCTCTTCCGTGACTGCGGCCGACACCGCCGTGTACTAC |
| | | TGCGCACGCGCTGGAATTGCCGCCCGGCTGAGGGGTGCCTTCGACATT |
| | | TGGGGACAGGGCACCATGGTCACCGTGTCCTCCGGCGGCGGAGGTTCC |
| | | GGGGGTGGAGGCTCAGGAGGAGGGGGGTCCGACATCGTCATGACTCAG |
| | | TCGCCCTCAAGCGTCAGCGCGTCCGTCGGGGACAGAGTGATCATCACC |
| | | TGTCGGGCGTCCCAGGGAATTCGCAACTGGCTGGCCTGGTATCAGCAG |
| | | AAGCCCGGAAAGGCCCCCAACCTGTTGATCTACGCCGCCTCAAACCTC |
| | | CAATCCGGGGTGCCGAGCCGCTTCAGCGGCTCCGGTTCGGGTGCCGAT |
| | | TTCACTCTGACCATCTCCTCCCTGCAACCTGAAGATGTGGCTACCTAC |
| | | TACTGCCAAAAGTACAACTCCGCACCTTTTACTTTCGGACCGGGGACC |
| | | AAAGTGGACATTAAG |
| 149367-aa | 252 | QVQLQESGPGLVKPSQTLSLTCTVSGGSISSGGYYWSWIRQHPGKGLE |
| VH | | WIGYIYYSGSTYYNPSLKSRVTISVDTSKNQFSLKLSSVTAADTAVYY |
| | | CARAGIAARLRGAFDIWGQGTMVTVSS |
| 149367-aa | 253 | DIVMTQSPSSVSASVGDRVIITCRASQGIRNWLAWYQQKPGKAPNLLI |
| VL | | YAASNLQSGVPSRFSGSGSGADFTLTISSLQPEDVATYYCQKYNSAPF |
| | | TFGPGTKVDIK |
| 149367-aa | 254 | MALPVTALLLPLALLLHAARPQVQLQESGPGLVKPSQTLSLTCTVSGG |
| Full CAR | | SISSGGYYWSWIRQHPGKGLEWIGYIYYSGSTYYNPSLKSRVTISVDT |
| | | SKNQFSLKLSSVTAADTAVYYCARAGIAARLRGAFDIWGQGTMVTVSS |
| | | GGGGSGGGGSGGGGSDIVMTQSPSSVSASVGDRVIITCRASQGIRNWL |
| | | AWYQQKPGKAPNLLIYAASNLQSGVPSRFSGSGSGADFTLTISSLQPE |
| | | DVATYYCQKYNSAPFTFGPGTKVDIKTTTPAPRPPTPAPTIASQPLSL |
| | | RPEACRPAAGGAVHTRGLDFACDIYIWAPLAGTCGVLLLSLVITLYCK |
| | | RGRKKLLYIFKQPFMRPVQTTQEEDGCSCRFPEEEEGGCELRVKFSRS |
| | | ADAPAYKQGQNQLYNELNLGRREEYDVLDKRRGRDPEMGGKPRRKNPQ |
| | | EGLYNELQKDKMAEAYSEIGMKGERRRGKGHDGLYQGLSTATKDTYDA |
| | | LHMQALPPR |
| 149367-nt | 255 | ATGGCCCTCCCTGTCACCGCCCTGCTGCTTCCGCTGGCTCTTCTGCTC |
| Full CAR | | CACGCCGCTCGGCCCCAAGTGCAGCTTCAGGAGAGCGGCCCGGGACTC |
| | | GTGAAGCCGTCCCAGACCCTGTCCCTGACTTGCACCGTGTCGGGAGGA |
| | | AGCATCTCGAGCGGAGGCTACTATTGGTCGTGGATTCGGCAGCACCCT |
| | | GGAAAGGGCCTGGAATGGATCGGCTACATCTACTACTCCGGCTCGACC |
| | | TACTACAACCCATCGCTGAAGTCCAGAGTGACAATCTCAGTGGACACG |
| | | TCCAAGAATCAGTTCAGCCTGAAGCTCTCTTCCGTGACTGCGGCCGAC |
| | | ACCGCCGTGTACTACTGCGCACGCGCTGGAATTGCCGCCCGGCTGAGG |
| | | GGTGCCTTCGACATTTGGGGACAGGGCACCATGGTCACCGTGTCCTCC |
| | | GGCGGCGGAGGTTCCGGGGGTGGAGGCTCAGGAGGAGGGGGGTCCGAC |
| | | ATCGTCATGACTCAGTCGCCCTCAAGCGTCAGCGCGTCCGTCGGGGAC |
| | | AGAGTGATCATCACCTGTCGGGCGTCCCAGGGAATTCGCAACTGGCTG |
| | | GCCTGGTATCAGCAGAAGCCCGGAAAGGCCCCCAACCTGTTGATCTAC |
| | | GCCGCCTCAAACCTCCAATCCGGGGTGCCGAGCCGCTTCAGCGGCTCC |
| | | GGTTCGGGTGCCGATTTCACTCTGACCATCTCCTCCCTGCAACCTGAA |
| | | GATGTGGCTACCTACTACTGCCAAAAGTACAACTCCGCACCTTTTACT |
| | | TTCGGACCGGGGACCAAAGTGGACATTAAGACCACTACCCCAGCACCG |
| | | AGGCCACCCACCCCGGCTCCTACCATCGCCTCCCAGCCTCTGTCCCTG |
| | | CGTCCGGAGGCATGTAGACCCGCAGCTGGTGGGGCCGTGCATACCCGG |
| | | GGTCTTGACTTCGCCTGCGATATCTACATTTGGGCCCCTCTGGCTGGT |
| | | ACTTGCGGGGTCCTGCTGCTTTCACTCGTGATCACTCTTTACTGTAAG |
| | | CGCGGTCGGAAGAAGCTGCTGTACATCTTTAAGCAACCCTTCATGAGG |
| | | CCTGTGCAGACTACTCAAGAGGAGGACGGCTGTTCATGCCGGTTCCCA |
| | | GAGGAGGAGGAAGGCGGCTGCGAACTGCGCGTGAAATTCAGCCGCAGC |
| | | GCAGATGCTCCAGCCTACAAGCAGGGGCAGAACCAGCTCTACAACGAA |
| | | CTCAATCTTGGTCGGAGAGAGGAGTACGACGTGCTGGACAAGCGGAGA |
| | | GGACGGGACCCAGAAATGGGCGGGAAGCCGCGCAGAAAGAATCCCCAA |
| | | GAGGGCCTGTACAACGAGCTCCAAAAGGATAAGATGGCAGAAGCCTAT |
| | | AGCGAGATTGGTATGAAAGGGGAACGCAGAAGAGGCAAAGGCCACGAC |
| | | GGACTGTACCAGGGACTCAGCACCGCCACCAAGGACACCTATGACGCT |
| | | CTTCACATGCAGGCCCTGCCGCCTCGG |

149368

| | | |
|---|---|---|
| 149368-aa | 256 | QVQLVQSGAEVKKPGSSVKVSCKASGGTFSSYAISWVRQAPGQGLEWM |
| ScFv | | GGIIPIFGTANYAQKFQGRVTITADESTSTAYMELSSLRSEDTAVYYC |
| domain | | ARRGGYQLLRWDVGLLRSAFDIWGQGTMVTVSSGGGGSGGGGSGGGGS |
| | | SYVLTQPPSVSVAPGQTARITCGGNNIGSKSVHWYQQKPGQAPVLVLY |
| | | GKNNRPSGVPDRFSGSRSGTTASLTITGAQAEDEADYYCSSRDSSGDH |
| | | LRVFGTGTKVTVL |
| 149368-nt | 257 | CAAGTGCAGCTGGTCCAGTCGGGCGCCGAGGTCAAGAAGCCCGGGAGC |
| ScFv | | TCTGTGAAAGTGTCCTGCAAGGCCTCCGGGGGCACCTTTAGCTCCTAC |
| domain | | GCCATCTCCTGGGTCCGCCAAGCACCGGGTCAAGGCCTGGAGTGGATG |
| | | GGGGGAATTATCCCTATCTTCGGCACTGCCAACTACGCCCAGAAGTTC |
| | | CAGGGACGCGTGACCATTACCGCGGACGAATCCACCTCCACCGCTTAT |
| | | ATGGAGCTGTCCAGCTTGCGCTCGGAAGATACCGCCGTGTACTACTGC |
| | | GCCCGGAGGGGTGGATACCAGCTGCTGAGATGGGACGTGGGCCTCCTG |
| | | CGGTCGGCGTTCGACATCTGGGGCCAGGGCACTATGGTCACTGTGTCC |
| | | AGCGGAGGAGGCGGATCGGGAGGCGGCGGATCAGGGGGAGGCGGTTCC |
| | | AGCTACGTGCTTACTCAACCCCCTTCGGTGTCCGTGGCCCCGGGACAG |
| | | ACCGCCAGAATCACTTGCGGAGGAAACAACATTGGGTCCAAGAGCGTG |
| | | CATTGGTACCAGCAGAAGCCAGGACAGGCCCCTGTGCTGGTGCTCTAC |
| | | GGGAAGAACAATCGGCCCAGCGGAGTGCCGGACAGGTTCTCGGGTTCA |
| | | CGCTCCGGTACAACCGCTTCACTGACTATCACCGGGGCCCAGGCAGAG |
| | | GATGAAGCGGACTACTACTGTTCCTCCCGGGATTCATCCGGCGACCAC |
| | | CTCCGGGTGTTCGGAACCGGAACGAAGGTCACCGTGCTG |
| 149368-aa | 258 | QVQLVQSGAEVKKPGSSVKVSCKASGGTFSSYAISWVRQAPGQGLEWM |
| VH | | GGIIPIFGTANYAQKFQGRVTITADESTSTAYMELSSLRSEDTAVYYC |
| | | ARRGGYQLLRWDVGLLRSAFDIWGQGTMVTVSS |
| 149368-aa | 259 | SYVLTQPPSVSVAPGQTARITCGGNNIGSKSVHWYQQKPGQAPVLVLY |
| VL | | GKNNRPSGVPDRFSGSRSGTTASLTITGAQAEDEADYYCSSRDSSGDH |
| | | LRVFGTGTKVTVL |
| 149368-aa | 260 | MALPVTALLLPLALLLHAARPQVQLVQSGAEVKKPGSSVKVSCKASGG |
| Full CAR | | TFSSYAISWVRQAPGQGLEWMGGIIPIFGTANYAQKFQGRVTITADES |
| | | TSTAYMELSSLRSEDTAVYYCARRGGYQLLRWDVGLLRSAFDIWGQGT |
| | | MVTVSSGGGGSGGGGSGGGGSSYVLTQPPSVSVAPGQTARITCGGNNI |
| | | GSKSVHWYQQKPGQAPVLVLYGKNNRPSGVPDRFSGSRSGTTASLTIT |
| | | GAQAEDEADYYCSSRDSSGDHLRVFGTGTKVTVLTTTPAPRPPTPAPT |
| | | IASQPLSLRPEACRPAAGGAVHTRGLDFACDIYIWAPLAGTCGVLLLS |
| | | LVITLYCKRGRKKLLYIFKQPFMRPVQTTQEEDGCSCRFPEEEEGGCE |
| | | LRVKFSRSADAPAYKQGQNQLYNELNLGRREEYDVLDKRRGRDPEMGG |
| | | KPRRKNPQEGLYNELQKDKMAEAYSEIGMKGERRRGKGHDGLYQGLST |
| | | ATKDTYDALHMQALPPR |
| 149368-nt | 261 | ATGGCCCTCCCTGTCACCGCCCTGCTGCTTCCGCTGGCTCTTCTGCTC |
| Full CAR | | CACGCCGCTCGGCCCCAAGTGCAGCTGGTCCAGTCGGGCGCCGAGGTC |
| | | AAGAAGCCCGGGAGCTCTGTGAAAGTGTCCTGCAAGGCCTCCGGGGGC |
| | | ACCTTTAGCTCCTACGCCATCTCCTGGGTCCGCCAAGCACCGGGTCAA |
| | | GGCCTGGAGTGGATGGGGGGAATTATCCCTATCTTCGGCACTGCCAAC |
| | | TACGCCCAGAAGTTCCAGGGACGCGTGACCATTACCGCGGACGAATCC |
| | | ACCTCCACCGCTTATATGGAGCTGTCCAGCTTGCGCTCGGAAGATACC |
| | | GCCGTGTACTACTGCGCCCGGAGGGGTGGATACCAGCTGCTGAGATGG |
| | | GACGTGGGCCTCCTGCGGTCGGCGTTCGACATCTGGGGCCAGGGCACT |
| | | ATGGTCACTGTGTCCAGCGGAGGAGGCGGATCGGGAGGCGGCGGATCA |
| | | GGGGGAGGCGGTTCCAGCTACGTGCTTACTCAACCCCCTTCGGTGTCC |
| | | GTGGCCCCGGGACAGACCGCCAGAATCACTTGCGGAGGAAACAACATT |
| | | GGGTCCAAGAGCGTGCATTGGTACCAGCAGAAGCCAGGACAGGCCCCT |
| | | GTGCTGGTGCTCTACGGGAAGAACAATCGGCCCAGCGGAGTGCCGGAC |
| | | AGGTTCTCGGGTTCACGCTCCGGTACAACCGCTTCACTGACTATCACC |
| | | GGGGCCCAGGCAGAGGATGAAGCGGACTACTACTGTTCCTCCCGGGAT |
| | | TCATCCGGCGACCACCTCCGGGTGTTCGGAACCGGAACGAAGGTCACC |
| | | GTGCTGACCACTACCCCAGCACCGAGGCCACCCACCCCGGCTCCTACC |
| | | ATCGCCTCCCAGCCTCTGTCCCTGCGTCCGGAGGCATGTAGACCCGCA |
| | | GCTGGTGGGGCCGTGCATACCCGGGGTCTTGACTTCGCCTGCGATATC |
| | | TACATTTGGGCCCCTCTGGCTGGTACTTGCGGGGTCCTGCTGCTTTCA |
| | | CTCGTGATCACTCTTTACTGTAAGCGCGGTCGGAAGAAGCTGCTGTAC |
| | | ATCTTTAAGCAACCCTTCATGAGGCCTGTGCAGACTACTCAAGAGGAG |
| | | GACGGCTGTTCATGCCGGTTCCCAGAGGAGGAGGAAGGCGGCTGCGAA |
| | | CTGCGCGTGAAATTCAGCCGCAGCGCAGATGCTCCAGCCTACAAGCAG |
| | | GGGCAGAACCAGCTCTACAACGAACTCAATCTTGGTCGGAGAGAGGAG |
| | | TACGACGTGCTGGACAAGCGGAGAGGACGGGACCCAGAAATGGGCGGG |
| | | AAGCCGCGCAGAAAGAATCCCCAAGAGGGCCTGTACAACGAGCTCCAA |
| | | AAGGATAAGATGGCAGAAGCCTATAGCGAGATTGGTATGAAAGGGGAA |
| | | CGCAGAAGAGGCAAAGGCCACGACGGACTGTACCAGGGACTCAGCACC |
| | | GCCACCAAGGACACCTATGACGCTCTTCACATGCAGGCCCTGCCGCCT |
| | | CGG |

149369

| | | |
|---|---|---|
| 149369-aa | 262 | EVQLQQSGPGLVKPSQTLSLTCAISGDSVSSNSAAWNWIRQSPSRGLE |
| ScFv | | WLGRTYYRSKWYSFYAISLKSRIIINPDTSKNQFSLQLKSVTPEDTAV |
| domain | | YYCARSSPEGLFLYWFDPWGQGTLVTVSSGGDGSGGGGSGGGGSSSEL |
| | | TQDPAVSVALGQTIRITCQGDSLGNYYATWYQQKPGQAPVLVIYGTNN |
| | | RPSGIPDRFSASSSGNTASLTITGAQAEDEADYYCNSRDSSGHHLLFG |
| | | TGTKVTVL |
| 149369-nt | 263 | GAAGTGCAGCTCCAACAGTCAGGACCGGGGCTCGTGAAGCCATCCCAG |
| ScFv | | ACCCTGTCCCTGACTTGTGCCATCTCGGGAGATAGCGTGTCATCGAAC |
| domain | | TCCGCCGCCTGGAACTGGATTCGGCAGAGCCCGTCCCGCGGACTGGAG |
| | | TGGCTTGGAAGGACCTACTACCGGTCCAAGTGGTACTCTTTCTACGCG |
| | | ATCTCGCTGAAGTCCCGCATTATCATTAACCCTGATACCTCCAAGAAT |
| | | CAGTTCTCCCTCCAACTGAAATCCGTCACCCCCGAGGACACAGCAGTG |
| | | TATTACTGCGCACGGAGCAGCCCCGAAGGACTGTTCCTGTATTGGTTT |
| | | GACCCCTGGGGCCAGGGGACTCTTGTGACCGTGTCGAGCGGCGGAGAT |
| | | GGGTCCGGTGGCGGTGGTTCGGGGGGCGGCGGATCATCATCCGAACTG |
| | | ACCCAGGACCCGGCTGTGTCCGTGGCGCTGGGACAAACCATCCGCATT |
| | | ACGTGCCAGGGAGACTCCCTGGGCAACTACTACGCCACTTGGTACCAG |
| | | CAGAAGCCGGGCCAAGCCCCTGTGTTGGTCATCTACGGGACCAACAAC |
| | | AGACCTTCCGGCATCCCCGACCGGTTCAGCGCTTCGTCCTCCGGCAAC |
| | | ACTGCCAGCCTGACCATCACTGGAGCGCAGGCCGAAGATGAGGCCGAC |
| | | TACTACTGCAACAGCAGAGACTCCTCGGGTCATCACCTCTTGTTCGGA |
| | | ACTGGAACCAAGGTCACCGTGCTG |
| 149369-aa | 264 | EVQLQQSGPGLVKPSQTLSLTCAISGDSVSSNSAAWNWIRQSPSRGLE |
| VH | | WLGRTYYRSKWYSFYAISLKSRIIINPDTSKNQFSLQLKSVTPEDTAV |
| | | YYCARSSPEGLFLYWFDPWGQGTLVTVSS |
| 149369-aa | 265 | SSELTQDPAVSVALGQTIRITCQGDSLGNYYATWYQQKPGQAPVLVIY |
| VL | | GTNNRPSGIPDRFSASSSGNTASLTITGAQAEDEADYYCNSRDSSGHH |
| | | LLFGTGTKVTVL |
| 149369-aa | 266 | MALPVTALLLPLALLLHAARPEVQLQQSGPGLVKPSQTLSLTCAISGD |
| Full CAR | | SVSSNSAAWNWIRQSPSRGLEWLGRTYYRSKWYSFYAISLKSRIIINP |
| | | DTSKNQFSLQLKSVTPEDTAVYYCARSSPEGLFLYWFDPWGQGTLVTV |
| | | SSGGDGSGGGGSGGGGSSSELTQDPAVSVALGQTIRITCQGDSLGNYY |
| | | ATWYQQKPGQAPVLVIYGTNNRPSGIPDRFSASSSGNTASLTITGAQA |
| | | EDEADYYCNSRDSSGHHLLFGTGTKVTVLTTTPAPRPPTPAPTIASQP |
| | | LSLRPEACRPAAGGAVHTRGLDFACDIYIWAPLAGTCGVLLLSLVITL |
| | | YCKRGRKKLLYIFKQPFMRPVQTTQEEDGCSCRFPEEEEGGCELRVKF |
| | | SRSADAPAYKQGQNQLYNELNLGRREEYDVLDKRRGRDPEMGGKPRRK |
| | | NPQEGLYNELQKDKMAEAYSEIGMKGERRRGKGHDGLYQGLSTATKDT |
| | | YDALHMQALPPR |
| 149369-nt | 267 | ATGGCCCTCCCTGTCACCGCCCTGCTGCTTCCGCTGGCTCTTCTGCTC |
| Full CAR | | CACGCCGCTCGGCCCGAAGTGCAGCTCCAACAGTCAGGACCGGGGCTC |
| | | GTGAAGCCATCCCAGACCCTGTCCCTGACTTGTGCCATCTCGGGAGAT |
| | | AGCGTGTCATCGAACTCCGCCGCCTGGAACTGGATTCGGCAGAGCCCG |
| | | TCCCGCGGACTGGAGTGGCTTGGAAGGACCTACTACCGGTCCAAGTGG |
| | | TACTCTTTCTACGCGATCTCGCTGAAGTCCCGCATTATCATTAACCCT |
| | | GATACCTCCAAGAATCAGTTCTCCCTCCAACTGAAATCCGTCACCCCC |
| | | GAGGACACAGCAGTGTATTACTGCGCACGGAGCAGCCCCGAAGGACTG |
| | | TTCCTGTATTGGTTTGACCCCTGGGGCCAGGGGACTCTTGTGACCGTG |
| | | TCGAGCGGCGGAGATGGGTCCGGTGGCGGTGGTTCGGGGGGCGGCGGA |
| | | TCATCATCCGAACTGACCCAGGACCCGGCTGTGTCCGTGGCGCTGGGA |
| | | CAAACCATCCGCATTACGTGCCAGGGAGACTCCCTGGGCAACTACTAC |
| | | GCCACTTGGTACCAGCAGAAGCCGGGCCAAGCCCCTGTGTTGGTCATC |
| | | TACGGGACCAACAACAGACCTTCCGGCATCCCCGACCGGTTCAGCGCT |
| | | TCGTCCTCCGGCAACACTGCCAGCCTGACCATCACTGGAGCGCAGGCC |
| | | GAAGATGAGGCCGACTACTACTGCAACAGCAGAGACTCCTCGGGTCAT |
| | | CACCTCTTGTTCGGAACTGGAACCAAGGTCACCGTGCTGACCACTACC |
| | | CCAGCACCGAGGCCACCCACCCCGGCTCCTACCATCGCCTCCCAGCCT |
| | | CTGTCCCTGCGTCCGGAGGCATGTAGACCCGCAGCTGGTGGGGCCGTG |
| | | CATACCCGGGGTCTTGACTTCGCCTGCGATATCTACATTTGGGCCCCT |
| | | CTGGCTGGTACTTGCGGGGTCCTGCTGCTTTCACTCGTGATCACTCTT |
| | | TACTGTAAGCGCGGTCGGAAGAAGCTGCTGTACATCTTTAAGCAACCC |
| | | TTCATGAGGCCTGTGCAGACTACTCAAGAGGAGGACGGCTGTTCATGC |
| | | CGGTTCCCAGAGGAGGAGGAAGGCGGCTGCGAACTGCGCGTGAAATTC |
| | | AGCCGCAGCGCAGATGCTCCAGCCTACAAGCAGGGGCAGAACCAGCTC |
| | | TACAACGAACTCAATCTTGGTCGGAGAGAGGAGTACGACGTGCTGGAC |
| | | AAGCGGAGAGGACGGGACCCAGAAATGGGCGGGAAGCCGCGCAGAAAG |
| | | AATCCCCAAGAGGGCCTGTACAACGAGCTCCAAAAGGATAAGATGGCA |
| | | GAAGCCTATAGCGAGATTGGTATGAAAGGGGAACGCAGAAGAGGCAAA |
| | | GGCCACGACGGACTGTACCAGGGACTCAGCACCGCCACCAAGGACACC |
| | | TATGACGCTCTTCACATGCAGGCCCTGCCGCCTCGG |

BCMA_EBB-C1978-A4

| | | |
|---|---|---|
| BCMA_EBB- | 268 | EVQLVESGGGLVQPGGSLRLSCAASGFTFSSYAMSWVRQAPGKGLEWV |
| C1978-A4- | | SAISGSGGSTYYADSVKGRFTISRDNSKNTLYLQMNSLRAEDTAVYYC |
| aa | | AKVEGSGSLDYWGQGTLVTVSSGGGGSGGGGSGGGGSEIVMTQSPGTL |
| ScFv | | SLSPGERATLSCRASQSVSSAYLAWYQQKPGQPPRLLISGASTRATGI |
| domain | | PDRFGGSGSGTDFTLTISRLEPEDFAVYYCQHYGSSFNGSSLFTFGQG |
| | | TRLEIK |
| BCMA_EBB- | 269 | GAAGTGCAGCTCGTGGAGTCAGGAGGCGGCCTGGTCCAGCCGGGAGGG |
| C1978-A4- | | TCCCTTAGACTGTCATGCGCCGCAAGCGGATTCACTTTCTCCTCCTAT |
| nt | | GCCATGAGCTGGGTCCGCCAAGCCCCCGGAAAGGGACTGGAATGGGTG |
| ScFv | | TCCGCCATCTCGGGGTCTGGAGGCTCAACTTACTACGCTGACTCCGTG |
| domain | | AAGGGACGGTTCACCATTAGCCGCGACAACTCCAAGAACACCCTCTAC |
| | | CTCCAAATGAACTCCCTGCGGGCCGAGGATACCGCCGTCTACTACTGC |
| | | GCCAAAGTGGAAGGTTCAGGATCGCTGGACTACTGGGGACAGGGTACT |
| | | CTCGTGACCGTGTCATCGGGCGGAGGAGGTTCCGGCGGTGGCGGCTCC |
| | | GGCGGCGGAGGGTCGGAGATCGTGATGACCCAGAGCCCTGGTACTCTG |
| | | AGCCTTTCGCCGGGAGAAAGGGCCACCCTGTCCTGCCGCGCTTCCCAA |
| | | TCCGTGTCCTCCGCGTACTTGGCGTGGTACCAGCAGAAGCCGGGACAG |
| | | CCCCCTCGGCTGCTGATCAGCGGGGCCAGCACCCGGGCAACCGGAATC |
| | | CCAGACAGATTCGGGGGTTCCGGCAGCGGCACAGATTTCACCCTGACT |
| | | ATTTCGAGGTTGGAGCCCGAGGACTTTGCGGTGTATTACTGTCAGCAC |
| | | TACGGGTCGTCCTTTAATGGCTCCAGCCTGTTCACGTTCGGACAGGGG |
| | | ACCCGCCTGGAAATCAAG |
| BCMA_EBB- | 270 | EVQLVESGGGLVQPGGSLRLSCAASGFTFSSYAMSWVRQAPGKGLEWV |
| C1978-A4- | | SAISGSGGSTYYADSVKGRFTISRDNSKNTLYLQMNSLRAEDTAVYYC |
| aa | | AKVEGSGSLDYWGQGTLVTVSS |
| VH | | |
| BCMA_EBB- | 271 | EIVMTQSPGTLSLSPGERATLSCRASQSVSSAYLAWYQQKPGQPPRLL |
| C1978-A4- | | ISGASTRATGIPDRFGGSGSGTDFTLTISRLEPEDFAVYYCQHYGSSF |
| aa | | NGSSLFTFGQGTRLEIK |
| VL | | |
| BCMA_EBB- | 272 | MALPVTALLLPLALLLHAARPEVQLVESGGGLVQPGGSLRLSCAASGF |
| C1978-A4- | | TFSSYAMSWVRQAPGKGLEWVSAISGSGGSTYYADSVKGRFTISRDNS |
| aa | | KNTLYLQMNSLRAEDTAVYYCAKVEGSGSLDYWGQGTLVTVSSGGGGS |
| Full CART | | GGGGSGGGGSEIVMTQSPGTLSLSPGERATLSCRASQSVSSAYLAWYQ |
| | | QKPGQPPRLLISGASTRATGIPDRFGGSGSGTDFTLTISRLEPEDFAV |
| | | YYCQHYGSSFNGSSLFTFGQGTRLEIKTTTPAPRPPTPAPTIASQPLS |
| | | LRPEACRPAAGGAVHTRGLDFACDIYIWAPLAGTCGVLLLSLVITLYC |
| | | KRGRKKLLYIFKQPFMRPVQTTQEEDGCSCRFPEEEEGGCELRVKFSR |
| | | SADAPAYKQGQNQLYNELNLGRREEYDVLDKRRGRDPEMGGKPRRKNP |
| | | QEGLYNELQKDKMAEAYSEIGMKGERRRGKGHDGLYQGLSTATKDTYD |
| | | ALHMQALPPR |
| BCMA_EBB- | 273 | ATGGCCCTCCCTGTCACCGCCCTGCTGCTTCCGCTGGCTCTTCTGCTC |
| C1978-A4- | | CACGCCGCTCGGCCCGAAGTGCAGCTCGTGGAGTCAGGAGGCGGCCTG |
| nt | | GTCCAGCCGGGAGGGTCCCTTAGACTGTCATGCGCCGCAAGCGGATTC |
| Full CART | | ACTTTCTCCTCCTATGCCATGAGCTGGGTCCGCCAAGCCCCCGGAAAG |
| | | GGACTGGAATGGGTGTCCGCCATCTCGGGGTCTGGAGGCTCAACTTAC |
| | | TACGCTGACTCCGTGAAGGGACGGTTCACCATTAGCCGCGACAACTCC |
| | | AAGAACACCCTCTACCTCCAAATGAACTCCCTGCGGGCCGAGGATACC |
| | | GCCGTCTACTACTGCGCCAAAGTGGAAGGTTCAGGATCGCTGGACTAC |
| | | TGGGGACAGGGTACTCTCGTGACCGTGTCATCGGGCGGAGGAGGTTCC |
| | | GGCGGTGGCGGCTCCGGCGGCGGAGGGTCGGAGATCGTGATGACCCAG |
| | | AGCCCTGGTACTCTGAGCCTTTCGCCGGGAGAAAGGGCCACCCTGTCC |
| | | TGCCGCGCTTCCCAATCCGTGTCCTCCGCGTACTTGGCGTGGTACCAG |
| | | CAGAAGCCGGGACAGCCCCCTCGGCTGCTGATCAGCGGGGCCAGCACC |
| | | CGGGCAACCGGAATCCCAGACAGATTCGGGGGTTCCGGCAGCGGCACA |
| | | GATTTCACCCTGACTATTTCGAGGTTGGAGCCCGAGGACTTTGCGGTG |
| | | TATTACTGTCAGCACTACGGGTCGTCCTTTAATGGCTCCAGCCTGTTC |
| | | ACGTTCGGACAGGGGACCCGCCTGGAAATCAAGACCACTACCCCAGCA |
| | | CCGAGGCCACCCACCCCGGCTCCTACCATCGCCTCCCAGCCTCTGTCC |
| | | CTGCGTCCGGAGGCATGTAGACCCGCAGCTGGTGGGGCCGTGCATACC |
| | | CGGGGTCTTGACTTCGCCTGCGATATCTACATTTGGGCCCCTCTGGCT |
| | | GGTACTTGCGGGGTCCTGCTGCTTTCACTCGTGATCACTCTTTACTGT |
| | | AAGCGCGGTCGGAAGAAGCTGCTGTACATCTTTAAGCAACCCTTCATG |
| | | AGGCCTGTGCAGACTACTCAAGAGGAGGACGGCTGTTCATGCCGGTTC |
| | | CCAGAGGAGGAGGAAGGCGGCTGCGAACTGCGCGTGAAATTCAGCCGC |
| | | AGCGCAGATGCTCCAGCCTACAAGCAGGGGCAGAACCAGCTCTACAAC |
| | | GAACTCAATCTTGGTCGGAGAGAGGAGTACGACGTGCTGGACAAGCGG |
| | | AGAGGACGGGACCCAGAAATGGGCGGGAAGCCGCGCAGAAAGAATCCC |
| | | CAAGAGGGCCTGTACAACGAGCTCCAAAAGGATAAGATGGCAGAAGCC |
| | | TATAGCGAGATTGGTATGAAAGGGGAACGCAGAAGAGGCAAAGGCCAC |
| | | GACGGACTGTACCAGGGACTCAGCACCGCCACCAAGGACACCTATGAC |
| | | GCTCTTCACATGCAGGCCCTGCCGCCTCGG |

BCMA_EBB-C1978-G1

| | | |
|---|---|---|
| BCMA_EBB- | 274 | EVQLVETGGGLVQPGGSLRLSCAASGITFSRYPMSWVRQAPGKG |
| C1978-G1- | | LEWVSGISDSGVSTYYADSAKGRFTISRDNSKNTLFLQMSSLRDE |
| aa | | DTAVYYCVTRAGSEASDIWGQGTMVTVSSGGGGSGGGGSGGG |
| ScFv | | GSEIVLTQSPATLSLSPGERATLSCRASQSVSNSLAWYQQKPGQA |
| domain | | PRLLIYDASSRATGIPDRFSGSGSGTDFTLTISRLEPEDFAIYYCQQ |
| | | FGTSSGLTFGGGTKLEIK |
| BCMA_EBB- | 275 | GAAGTGCAACTGGTGGAAACCGGTGGCGGCCTGGTGCAGCCTGGAGGA |
| C1978-G1- | | TCATTGAGGCTGTCATGCGCGGCCAGCGGTATTACCTTCTCCCGGTAC |
| nt | | CCCATGTCCTGGGTCAGACAGGCCCCGGGGAAAGGGCTTGAATGGGTG |
| ScFv | | TCCGGGATCTCGGACTCCGGTGTCAGCACTTACTACGCCGACTCCGCC |
| domain | | AAGGGACGCTTCACCATTTCCCGGGACAACTCGAAGAACACCCTGTTC |
| | | CTCCAAATGAGCTCCCTCCGGGACGAGGATACTGCAGTGTACTACTGC |
| | | GTGACCCGCGCCGGGTCCGAGGCGTCTGACATTTGGGGACAGGGCACT |
| | | ATGGTCACCGTGTCGTCCGGCGGAGGGGGCTCGGGAGGCGGTGGCAGC |
| | | GGAGGAGGAGGGTCCGAGATCGTGCTGACCCAATCCCCGGCCACCCTC |
| | | TCGCTGAGCCCTGGAGAAAGGGCAACCTTGTCCTGTCGCGCGAGCCAG |
| | | TCCGTGAGCAACTCCCTGGCCTGGTACCAGCAGAAGCCCGGACAGGCT |
| | | CCGAGACTTCTGATCTACGACGCTTCGAGCCGGGCCACTGGAATCCCC |
| | | GACCGCTTTTCGGGGTCCGGCTCAGGAACCGATTTCACCCTGACAATC |
| | | TCACGGCTGGAGCCAGAGGATTTCGCCATCTATTACTGCCAGCAGTTC |
| | | GGTACTTCCTCCGGCCTGACTTTCGGAGGCGGCACGAAGCTCGAAATC |
| | | AAG |
| BCMA_EBB- | 276 | EVQLVETGGGLVQPGGSLRLSCAASGITFSRYPMSWVRQAPGKGLEWV |
| C1978-G1- | | SGISDSGVSTYYADSAKGRFTISRDNSKNTLFLQMSSLRDEDTAVYYC |
| aa | | VTRAGSEASDIWGQGTMVTVSS |
| VH | | |
| BCMA_EBB- | 277 | EIVLTQSPATLSLSPGERATLSCRASQSVSNSLAWYQQKPGQAPRLLI |
| C1978-G1- | | YDASSRATGIPDRFSGSGSGTDFTLTISRLEPEDFAIYYCQQFGTSSG |
| aa | | LTFGGGTKLEIK |
| VL | | |
| BCMA_EBB- | 278 | MALPVTALLLPLALLLHAARPEVQLVETGGGLVQPGGSLRLSCA |
| C1978-G1- | | ASGITFSRYPMSWVRQAPGKGLEWVSGISDSGVSTYYADSAKGR |
| aa | | FTISRDNSKNTLFLQMSSLRDEDTAVYYCVTRAGSEASDIWGQG |
| Full CART | | TMVTVSSGGGGSGGGGSGGGGSEIVLTQSPATLSLSPGERATLSC |
| | | RASQSVSNSLAWYQQKPGQAPRLLIYDASSRATGIPDRFSGSGSG |
| | | TDFTLTISRLEPEDFAIYYCQQFGTSSGLTFGGGTKLEIKTTTPAPR |
| | | PPTPAPTIASQPLSLRPEACRPAAGGAVHTRGLDFACDIYIWAPL |
| | | AGTCGVLLLSLVITLYCKRGRKKLLYIFKQPFMRPVQTTQEEDG |
| | | CSCRFPEEEEGGCELRVKFSRSADAPAYKQGQNQLYNELNLGRR |
| | | EEYDVLDKRRGRDPEMGGKPRRKNPQEGLYNELQKDKMAEAY |
| | | SEIGMKGERRRGKGHDGLYQGLSTATKDTYDALHMQALPPR |
| BCMA_EBB- | 279 | ATGGCCCTCCCTGTCACCGCCCTGCTGCTTCCGCTGGCTCTTCTGCTC |
| C1978-G1- | | CACGCCGCTCGGCCCGAAGTGCAACTGGTGGAAACCGGTGGCGGCCTG |
| nt | | GTGCAGCCTGGAGGATCATTGAGGCTGTCATGCGCGGCCAGCGGTATT |
| Full CART | | ACCTTCTCCCGGTACCCCATGTCCTGGGTCAGACAGGCCCCGGGGAAA |
| | | GGGCTTGAATGGGTGTCCGGGATCTCGGACTCCGGTGTCAGCACTTAC |
| | | TACGCCGACTCCGCCAAGGGACGCTTCACCATTTCCCGGGACAACTCG |
| | | AAGAACACCCTGTTCCTCCAAATGAGCTCCCTCCGGGACGAGGATACT |
| | | GCAGTGTACTACTGCGTGACCCGCGCCGGGTCCGAGGCGTCTGACATT |
| | | TGGGGACAGGGCACTATGGTCACCGTGTCGTCCGGCGGAGGGGGCTCG |
| | | GGAGGCGGTGGCAGCGGAGGAGGAGGGTCCGAGATCGTGCTGACCCAA |
| | | TCCCCGGCCACCCTCTCGCTGAGCCCTGGAGAAAGGGCAACCTTGTCC |
| | | TGTCGCGCGAGCCAGTCCGTGAGCAACTCCCTGGCCTGGTACCAGCAG |
| | | AAGCCCGGACAGGCTCCGAGACTTCTGATCTACGACGCTTCGAGCCGG |
| | | GCCACTGGAATCCCCGACCGCTTTTCGGGGTCCGGCTCAGGAACCGAT |
| | | TTCACCCTGACAATCTCACGGCTGGAGCCAGAGGATTTCGCCATCTAT |
| | | TACTGCCAGCAGTTCGGTACTTCCTCCGGCCTGACTTTCGGAGGCGGC |
| | | ACGAAGCTCGAAATCAAGACCACTACCCCAGCACCGAGGCCACCCACC |
| | | CCGGCTCCTACCATCGCCTCCCAGCCTCTGTCCCTGCGTCCGGAGGCA |
| | | TGTAGACCCGCAGCTGGTGGGGCCGTGCATACCCGGGGTCTTGACTTC |
| | | GCCTGCGATATCTACATTTGGGCCCCTCTGGCTGGTACTTGCGGGGTC |
| | | CTGCTGCTTTCACTCGTGATCACTCTTTACTGTAAGCGCGGTCGGAAG |
| | | AAGCTGCTGTACATCTTTAAGCAACCCTTCATGAGGCCTGTGCAGACT |
| | | ACTCAAGAGGAGGACGGCTGTTCATGCCGGTTCCCAGAGGAGGAGGAA |
| | | GGCGGCTGCGAACTGCGCGTGAAATTCAGCCGCAGCGCAGATGCTCCA |
| | | GCCTACAAGCAGGGGCAGAACCAGCTCTACAACGAACTCAATCTTGGT |
| | | CGGAGAGAGGAGTACGACGTGCTGGACAAGCGGAGAGGACGGGACCCA |
| | | GAAATGGGCGGGAAGCCGCGCAGAAAGAATCCCCAAGAGGGCCTGTAC |
| | | AACGAGCTCCAAAAGGATAAGATGGCAGAAGCCTATAGCGAGATTGGT |
| | | ATGAAAGGGGAACGCAGAAGAGGCAAAGGCCACGACGGACTGTACCAG |
| | | GGACTCAGCACCGCCACCAAGGACACCTATGACGCTCTTCACATGCAG |
| | | GCCCTGCCGCCTCGG |

BCMA_EBB-C1979-C1

| | | |
|---|---|---|
| BCMA_EBB- | 280 | QVQLVESGGGLVQPGGSLRLSCAASGFTFSSYAMSWVRQAPGKGLEWV |
| C1979-C1- | | SAISGSGGSTYYADSVKGRFTISRDNAKNSLYLQMNSLRAEDTAIYYC |
| aa | | ARATYKRELRYYYGMDVWGQGTMVTVSSGGGGSGGGGSGGGGSEIVMT |
| ScFv | | QSPGTVSLSPGERATLSCRASQSVSSSFLAWYQQKPGQAPRLLIYGAS |
| domain | | SRATGIPDRFSGSGSGTDFTLTISRLEPEDSAVYYCQQYHSSPSWTFG |
| | | QGTRLEIK |
| BCMA_EBB- | 281 | CAAGTGCAGCTCGTGGAATCGGGTGGCGGACTGGTGCAGCCGGGGGGC |
| C1979-C1- | | TCACTTAGACTGTCCTGCGCGGCCAGCGGATTCACTTTCTCCTCCTAC |
| nt | | GCCATGTCCTGGGTCAGACAGGCCCCTGGAAAGGGCCTGGAATGGGTG |
| ScFv | | TCCGCAATCAGCGGCAGCGGCGGCTCGACCTATTACGCGGATTCAGTG |
| domain | | AAGGGCAGATTCACCATTTCCCGGGACAACGCCAAGAACTCCTTGTAC |
| | | CTTCAAATGAACTCCCTCCGCGCGGAAGATACCGCAATCTACTACTGC |
| | | GCTCGGGCCACTTACAAGAGGGAACTGCGCTACTACTACGGGATGGAC |
| | | GTCTGGGGCCAGGGAACCATGGTCACCGTGTCCAGCGGAGGAGGAGGA |
| | | TCGGGAGGAGGCGGTAGCGGGGGTGGAGGGTCGGAGATCGTGATGACC |
| | | CAGTCCCCCGGCACTGTGTCGCTGTCCCCCGGCGAACGGGCCACCCTG |
| | | TCATGTCGGGCCAGCCAGTCAGTGTCGTCAAGCTTCCTCGCCTGGTAC |
| | | CAGCAGAAACCGGGACAAGCTCCCCGCCTGCTGATCTACGGAGCCAGC |
| | | AGCCGGGCCACCGGTATTCCTGACCGGTTCTCCGGTTCGGGGTCCGGG |
| | | ACCGACTTTACTCTGACTATCTCTCGCCTCGAGCCAGAGGACTCCGCC |
| | | GTGTATTACTGCCAGCAGTACCACTCCTCCCCGTCCTGGACGTTCGGA |
| | | CAGGGCACAAGGCTGGAGATTAAG |
| BCMA_EBB- | 282 | QVQLVESGGGLVQPGGSLRLSCAASGFTFSSYAMSWVRQAPGKGLEWV |
| C1979-C1- | | SAISGSGGSTYYADSVKGRFTISRDNAKNSLYLQMNSLRAEDTAIYYC |
| aa | | ARATYKRELRYYYGMDVWGQGTMVTVSS |
| VH | | |
| BCMA_EBB- | 283 | EIVMTQSPGTVSLSPGERATLSCRASQSVSSSFLAWYQQKPGQAPRLL |
| C1979-C1- | | IYGASSRATGIPDRFSGSGSGTDFTLTISRLEPEDSAVYYCQQYHSSP |
| aa | | SWTFGQGTRLEIK |
| VL | | |
| BCMA_EBB- | 284 | MALPVTALLLPLALLLHAARPQVQLVESGGGLVQPGGSLRLSCAASGF |
| C1979-C1- | | TFSSYAMSWVRQAPGKGLEWVSAISGSGGSTYYADSVKGRFTISRDNA |
| aa | | KNSLYLQMNSLRAEDTAIYYCARATYKRELRYYYGMDVWGQGTMVTVS |
| Full CART | | SGGGGSGGGGSGGGGSEIVMTQSPGTVSLSPGERATLSCRASQSVSSS |
| | | FLAWYQQKPGQAPRLLIYGASSRATGIPDRFSGSGSGTDFTLTISRLE |
| | | PEDSAVYYCQQYHSSPSWTFGQGTRLEIKTTTPAPRPPTPAPTIASQP |
| | | LSLRPEACRPAAGGAVHTRGLDFACDIYIWAPLAGTCGVLLLSLVITL |
| | | YCKRGRKKLLYIFKQPFMRPVQTTQEEDGCSCRFPEEEEGGCELRVKF |
| | | SRSADAPAYKQGQNQLYNELNLGRREEYDVLDKRRGRDPEMGGKPRRK |
| | | NPQEGLYNELQKDKMAEAYSEIGMKGERRRGKGHDGLYQGLSTATKDT |
| | | YDALHMQALPPR |
| BCMA_EBB- | 285 | ATGGCCCTCCCTGTCACCGCCCTGCTGCTTCCGCTGGCTCTTCTGCTC |
| C1979-C1- | | CACGCCGCTCGGCCCCAAGTGCAGCTCGTGGAATCGGGTGGCGGACTG |
| nt | | GTGCAGCCGGGGGGCTCACTTAGACTGTCCTGCGCGGCCAGCGGATTC |
| Full CART | | ACTTTCTCCTCCTACGCCATGTCCTGGGTCAGACAGGCCCCTGGAAAG |
| | | GGCCTGGAATGGGTGTCCGCAATCAGCGGCAGCGGCGGCTCGACCTAT |
| | | TACGCGGATTCAGTGAAGGGCAGATTCACCATTTCCCGGGACAACGCC |
| | | AAGAACTCCTTGTACCTTCAAATGAACTCCCTCCGCGCGGAAGATACC |
| | | GCAATCTACTACTGCGCTCGGGCCACTTACAAGAGGGAACTGCGCTAC |
| | | TACTACGGGATGGACGTCTGGGGCCAGGGAACCATGGTCACCGTGTCC |
| | | AGCGGAGGAGGAGGATCGGGAGGAGGCGGTAGCGGGGGTGGAGGGTCG |
| | | GAGATCGTGATGACCCAGTCCCCCGGCACTGTGTCGCTGTCCCCCGGC |
| | | GAACGGGCCACCCTGTCATGTCGGGCCAGCCAGTCAGTGTCGTCAAGC |
| | | TTCCTCGCCTGGTACCAGCAGAAACCGGGACAAGCTCCCCGCCTGCTG |
| | | ATCTACGGAGCCAGCAGCCGGGCCACCGGTATTCCTGACCGGTTCTCC |
| | | GGTTCGGGGTCCGGGACCGACTTTACTCTGACTATCTCTCGCCTCGAG |
| | | CCAGAGGACTCCGCCGTGTATTACTGCCAGCAGTACCACTCCTCCCCG |
| | | TCCTGGACGTTCGGACAGGGCACAAGGCTGGAGATTAAGACCACTACC |
| | | CCAGCACCGAGGCCACCCACCCCGGCTCCTACCATCGCCTCCCAGCCT |
| | | CTGTCCCTGCGTCCGGAGGCATGTAGACCCGCAGCTGGTGGGGCCGTG |
| | | CATACCCGGGGTCTTGACTTCGCCTGCGATATCTACATTTGGGCCCCT |
| | | CTGGCTGGTACTTGCGGGGTCCTGCTGCTTTCACTCGTGATCACTCTT |
| | | TACTGTAAGCGCGGTCGGAAGAAGCTGCTGTACATCTTTAAGCAACCC |
| | | TTCATGAGGCCTGTGCAGACTACTCAAGAGGAGGACGGCTGTTCATGC |
| | | CGGTTCCCAGAGGAGGAGGAAGGCGGCTGCGAACTGCGCGTGAAATTC |
| | | AGCCGCAGCGCAGATGCTCCAGCCTACAAGCAGGGGCAGAACCAGCTC |
| | | TACAACGAACTCAATCTTGGTCGGAGAGAGGAGTACGACGTGCTGGAC |
| | | AAGCGGAGAGGACGGGACCCAGAAATGGGCGGGAAGCCGCGCAGAAAG |
| | | AATCCCCAAGAGGGCCTGTACAACGAGCTCCAAAAGGATAAGATGGCA |
| | | GAAGCCTATAGCGAGATTGGTATGAAAGGGGAACGCAGAAGAGGCAAA |
| | | GGCCACGACGGACTGTACCAGGGACTCAGCACCGCCACCAAGGACACC |
| | | TATGACGCTCTTCACATGCAGGCCCTGCCGCCTCGG |

BCMA_EBB-C1978-C7

| | | |
|---|---|---|
| BCMA_EBB- | 286 | EVQLVETGGGLVQPGGSLRLSCAASGFTFSSYAMSWVRQAPGKGLEWV |
| C1978-C7- | | SAISGSGGSTYYADSVKGRFTISRDNSKNTLYLQMNTLKAEDTAVYYC |
| aa | | ARATYKRELRYYYGMDVWGQGTTVTVSSGGGGSGGGGSGGGGSEIVLT |
| ScFv | | QSPSTLSLSPGESATLSCRASQSVSTTFLAWYQQKPGQAPRLLIYGSS |
| domain | | NRATGIPDRFSGSGSGTDFTLTIRRLEPEDFAVYYCQQYHSSPSWTFG |
| | | QGTKVEIK |
| BCMA_EBB- | 287 | GAGGTGCAGCTTGTGGAAACCGGTGGCGGACTGGTGCAGCCCGGAGGA |
| C1978-C7- | | AGCCTCAGGCTGTCCTGCGCCGCGTCCGGCTTCACCTTCTCCTCGTAC |
| nt | | GCCATGTCCTGGGTCCGCCAGGCCCCCGGAAAGGGCCTGGAATGGGTG |
| ScFv | | TCCGCCATCTCTGGAAGCGGAGGTTCCACGTACTACGCGGACAGCGTC |
| domain | | AAGGGAAGGTTCACAATCTCCCGCGATAATTCGAAGAACACTCTGTAC |
| | | CTTCAAATGAACACCCTGAAGGCCGAGGACACTGCTGTGTACTACTGC |
| | | GCACGGGCCACCTACAAGAGAGAGCTCCGGTACTACTACGGAATGGAC |
| | | GTCTGGGGCCAGGGAACTACTGTGACCGTGTCCTCGGGAGGGGGTGGC |
| | | TCCGGGGGGGGCGGCTCCGGCGGAGGCGGTTCCGAGATTGTGCTGACC |
| | | CAGTCACCTTCAACTCTGTCGCTGTCCCCGGGAGAGAGCGCTACTCTG |
| | | AGCTGCCGGGCCAGCCAGTCCGTGTCCACCACCTTCCTCGCCTGGTAT |
| | | CAGCAGAAGCCGGGGCAGGCACCACGGCTCTTGATCTACGGGTCAAGC |
| | | AACAGAGCGACCGGAATTCCTGACCGCTTCTCGGGGAGCGGTTCAGGC |
| | | ACCGACTTCACCCTGACTATCCGGCGCCTGGAACCCGAAGATTTCGCC |
| | | GTGTATTACTGTCAACAGTACCACTCCTCGCCGTCCTGGACCTTTGGC |
| | | CAAGGAACCAAAGTGGAAATCAAG |
| BCMA_EBB- | 288 | EVQLVETGGGLVQPGGSLRLSCAASGFTFSSYAMSWVRQAPGKGLEWV |
| C1978-C7- | | SAISGSGGSTYYADSVKGRFTISRDNSKNTLYLQMNTLKAEDTAVYYC |
| aa | | ARATYKRELRYYYGMDVWGQGTTVTVSS |
| VH | | |
| BCMA_EBB- | 289 | EIVLTQSPSTLSLSPGESATLSCRASQSVSTTFLAWYQQKPGQAPRLL |
| C1978-C7- | | IYGSSNRATGIPDRFSGSGSGTDFTLTIRRLEPEDFAVYYCQQYHSSP |
| aa | | SWTFGQGTKVEIK |
| VL | | |
| BCMA_EBB- | 290 | MALPVTALLLPLALLLHAARPEVQLVETGGGLVQPGGSLRLSCAASGF |
| C1978-C7- | | TFSSYAMSWVRQAPGKGLEWVSAISGSGGSTYYADSVKGRFTISRDNS |
| aa | | KNTLYLQMNTLKAEDTAVYYCARATYKRELRYYYGMDVWGQGTTVTVS |
| Full CART | | SGGGGSGGGGSGGGGSEIVLTQSPSTLSLSPGESATLSCRASQSVSTT |
| | | FLAWYQQKPGQAPRLLIYGSSNRATGIPDRFSGSGSGTDFTLTIRRLE |
| | | PEDFAVYYCQQYHSSPSWTFGQGTKVEIKTTTPAPRPPTPAPTIASQP |
| | | LSLRPEACRPAAGGAVHTRGLDFACDIYIWAPLAGTCGVLLLSLVITL |
| | | YCKRGRKKLLYIFKQPFMRPVQTTQEEDGCSCRFPEEEEGGCELRVKF |
| | | SRSADAPAYKQGQNQLYNELNLGRREEYDVLDKRRGRDPEMGGKPRRK |
| | | NPQEGLYNELQKDKMAEAYSEIGMKGERRRGKGHDGLYQGLSTATKDT |
| | | YDALHMQALPPR |
| BCMA_EBB- | 291 | ATGGCCCTCCCTGTCACCGCCCTGCTGCTTCCGCTGGCTCTTCTGCTC |
| C1978-C7- | | CACGCCGCTCGGCCCGAGGTGCAGCTTGTGGAAACCGGTGGCGGACTG |
| nt | | GTGCAGCCCGGAGGAAGCCTCAGGCTGTCCTGCGCCGCGTCCGGCTTC |
| Full CART | | ACCTTCTCCTCGTACGCCATGTCCTGGGTCCGCCAGGCCCCCGGAAAG |
| | | GGCCTGGAATGGGTGTCCGCCATCTCTGGAAGCGGAGGTTCCACGTAC |
| | | TACGCGGACAGCGTCAAGGGAAGGTTCACAATCTCCCGCGATAATTCG |
| | | AAGAACACTCTGTACCTTCAAATGAACACCCTGAAGGCCGAGGACACT |
| | | GCTGTGTACTACTGCGCACGGGCCACCTACAAGAGAGAGCTCCGGTAC |
| | | TACTACGGAATGGACGTCTGGGGCCAGGGAACTACTGTGACCGTGTCC |
| | | TCGGGAGGGGGTGGCTCCGGGGGGGGCGGCTCCGGCGGAGGCGGTTCC |
| | | GAGATTGTGCTGACCCAGTCACCTTCAACTCTGTCGCTGTCCCCGGGA |
| | | GAGAGCGCTACTCTGAGCTGCCGGGCCAGCCAGTCCGTGTCCACCACC |
| | | TTCCTCGCCTGGTATCAGCAGAAGCCGGGGCAGGCACCACGGCTCTTG |
| | | ATCTACGGGTCAAGCAACAGAGCGACCGGAATTCCTGACCGCTTCTCG |
| | | GGGAGCGGTTCAGGCACCGACTTCACCCTGACTATCCGGCGCCTGGAA |
| | | CCCGAAGATTTCGCCGTGTATTACTGTCAACAGTACCACTCCTCGCCG |
| | | TCCTGGACCTTTGGCCAAGGAACCAAAGTGGAAATCAAGACCACTACC |
| | | CCAGCACCGAGGCCACCCACCCCGGCTCCTACCATCGCCTCCCAGCCT |
| | | CTGTCCCTGCGTCCGGAGGCATGTAGACCCGCAGCTGGTGGGGCCGTG |
| | | CATACCCGGGGTCTTGACTTCGCCTGCGATATCTACATTTGGGCCCCT |
| | | CTGGCTGGTACTTGCGGGGTCCTGCTGCTTTCACTCGTGATCACTCTT |
| | | TACTGTAAGCGCGGTCGGAAGAAGCTGCTGTACATCTTTAAGCAACCC |
| | | TTCATGAGGCCTGTGCAGACTACTCAAGAGGAGGACGGCTGTTCATGC |
| | | CGGTTCCCAGAGGAGGAGGAAGGCGGCTGCGAACTGCGCGTGAAATTC |
| | | AGCCGCAGCGCAGATGCTCCAGCCTACAAGCAGGGGCAGAACCAGCTC |
| | | TACAACGAACTCAATCTTGGTCGGAGAGAGGAGTACGACGTGCTGGAC |
| | | AAGCGGAGAGGACGGGACCCAGAAATGGGCGGGAAGCCGCGCAGAAAG |
| | | AATCCCCAAGAGGGCCTGTACAACGAGCTCCAAAAGGATAAGATGGCA |
| | | GAAGCCTATAGCGAGATTGGTATGAAAGGGGAACGCAGAAGAGGCAAA |
| | | GGCCACGACGGACTGTACCAGGGACTCAGCACCGCCACCAAGGACACC |
| | | TATGACGCTCTTCACATGCAGGCCCTGCCGCCTCGG |

BCMA_EBB-C1978-D10

| | | |
|---|---|---|
| BCMA_EBB- | 292 | EVQLVETGGGLVQPGRSLRLSCAASGFTFDDYAMHWVRQAPGKGLEWV |
| C1978- | | SGISWNSGSIGYADSVKGRFTISRDNAKNSLYLQMNSLRDEDTAVYYC |
| D10-aa | | ARVGKAVPDVWGQGTTVTVSSGGGGSGGGGSGGGGSDIVMTQTPSSLS |
| ScFv | | ASVGDRVTITCRASQSISSYLNWYQQKPGKAPKLLIYAASSLQSGVPS |
| domain | | RFSGSGSGTDFTLTISSLQPEDFATYYCQQSYSTPYSFGQGTRLEIK |
| BCMA_EBB- | 293 | GAAGTGCAGCTCGTGGAAACTGGAGGTGGACTCGTGCAGCCTGGACGG |
| C1978- | | TCGCTGCGGCTGAGCTGCGCTGCATCCGGCTTCACCTTCGACGATTAT |
| D10-nt | | GCCATGCACTGGGTCAGACAGGCGCCAGGGAAGGGACTTGAGTGGGTG |
| ScFv | | TCCGGTATCAGCTGGAATAGCGGCTCAATCGGATACGCGGACTCCGTG |
| domain | | AAGGGAAGGTTCACCATTTCCCGCGACAACGCCAAGAACTCCCTGTAC |
| | | TTGCAAATGAACAGCCTCCGGGATGAGGACACTGCCGTGTACTACTGC |
| | | GCCCGCGTCGGAAAAGCTGTGCCCGACGTCTGGGGCCAGGGAACCACT |
| | | GTGACCGTGTCCAGCGGCGGGGGTGGATCGGGCGGTGGAGGGTCCGGT |
| | | GGAGGGGGCTCAGATATTGTGATGACCCAGACCCCCTCGTCCCTGTCC |
| | | GCCTCGGTCGGCGACCGCGTGACTATCACATGTAGAGCCTCGCAGAGC |
| | | ATCTCCAGCTACCTGAACTGGTATCAGCAGAAGCCGGGGAAGGCCCCG |
| | | AAGCTCCTGATCTACGCGGCATCATCACTGCAATCGGGAGTGCCGAGC |
| | | CGGTTTTCCGGGTCCGGCTCCGGCACCGACTTCACGCTGACCATTTCT |
| | | TCCCTGCAACCCGAGGACTTCGCCACTTACTACTGCCAGCAGTCCTAC |
| | | TCCACCCCTTACTCCTTCGGCCAAGGAACCAGGCTGGAAATCAAG |
| BCMA_EBB- | 294 | EVQLVETGGGLVQPGRSLRLSCAASGFTFDDYAMHWVRQAPGKGLEWV |
| C1978- | | SGISWNSGSIGYADSVKGRFTISRDNAKNSLYLQMNSLRDEDTAVYYC |
| D10-aa | | ARVGKAVPDVWGQGTTVTVSS |
| VH | | |
| BCMA_EBB- | 295 | DIVMTQTPSSLSASVGDRVTITCRASQSISSYLNWYQQKPGKAPKLLI |
| C1978- | | YAASSLQSGVPSRFSGSGSGTDFTLTISSLQPEDFATYYCQQSYSTPY |
| D10-aa | | SFGQGTRLEIK |
| VL | | |
| BCMA_EBB- | 296 | MALPVTALLLPLALLLHAARPEVQLVETGGGLVQPGRSLRLSCAASGF |
| C1978- | | TFDDYAMHWVRQAPGKGLEWVSGISWNSGSIGYADSVKGRFTISRDNA |
| D10-aa | | KNSLYLQMNSLRDEDTAVYYCARVGKAVPDVWGQGTTVTVSSGGGGSG |
| Full CART | | GGGSGGGGSDIVMTQTPSSLSASVGDRVTITCRASQSISSYLNWYQQK |
| | | PGKAPKLLIYAASSLQSGVPSRFSGSGSGTDFTLTISSLQPEDFATYY |
| | | CQQSYSTPYSFGQGTRLEIKTTTPAPRPPTPAPTIASQPLSLRPEACR |
| | | PAAGGAVHTRGLDFACDIYIWAPLAGTCGVLLLSLVITLYCKRGRKKL |
| | | LYIFKQPFMRPVQTTQEEDGCSCRFPEEEEGGCELRVKFSRSADAPAY |
| | | KQGQNQLYNELNLGRREEYDVLDKRRGRDPEMGGKPRRKNPQEGLYNE |
| | | LQKDKMAEAYSEIGMKGERRRGKGHDGLYQGLSTATKDTYDALHMQAL |
| | | PPR |
| BCMA_EBB- | 297 | ATGGCCCTCCCTGTCACCGCCCTGCTGCTTCCGCTGGCTCTTCTGCTC |
| C1978- | | CACGCCGCTCGGCCCGAAGTGCAGCTCGTGGAAACTGGAGGTGGACTC |
| D10-nt | | GTGCAGCCTGGACGGTCGCTGCGGCTGAGCTGCGCTGCATCCGGCTTC |
| Full CART | | ACCTTCGACGATTATGCCATGCACTGGGTCAGACAGGCGCCAGGGAAG |
| | | GGACTTGAGTGGGTGTCCGGTATCAGCTGGAATAGCGGCTCAATCGGA |
| | | TACGCGGACTCCGTGAAGGGAAGGTTCACCATTTCCCGCGACAACGCC |
| | | AAGAACTCCCTGTACTTGCAAATGAACAGCCTCCGGGATGAGGACACT |
| | | GCCGTGTACTACTGCGCCCGCGTCGGAAAAGCTGTGCCCGACGTCTGG |
| | | GGCCAGGGAACCACTGTGACCGTGTCCAGCGGCGGGGGTGGATCGGGC |
| | | GGTGGAGGGTCCGGTGGAGGGGGCTCAGATATTGTGATGACCCAGACC |
| | | CCCTCGTCCCTGTCCGCCTCGGTCGGCGACCGCGTGACTATCACATGT |
| | | AGAGCCTCGCAGAGCATCTCCAGCTACCTGAACTGGTATCAGCAGAAG |
| | | CCGGGGAAGGCCCCGAAGCTCCTGATCTACGCGGCATCATCACTGCAA |
| | | TCGGGAGTGCCGAGCCGGTTTTCCGGGTCCGGCTCCGGCACCGACTTC |
| | | ACGCTGACCATTTCTTCCCTGCAACCCGAGGACTTCGCCACTTACTAC |
| | | TGCCAGCAGTCCTACTCCACCCCTTACTCCTTCGGCCAAGGAACCAGG |
| | | CTGGAAATCAAGACCACTACCCCAGCACCGAGGCCACCCACCCCGGCT |
| | | CCTACCATCGCCTCCCAGCCTCTGTCCCTGCGTCCGGAGGCATGTAGA |
| | | CCCGCAGCTGGTGGGGCCGTGCATACCCGGGGTCTTGACTTCGCCTGC |
| | | GATATCTACATTTGGGCCCCTCTGGCTGGTACTTGCGGGGTCCTGCTG |
| | | CTTTCACTCGTGATCACTCTTTACTGTAAGCGCGGTCGGAAGAAGCTG |
| | | CTGTACATCTTTAAGCAACCCTTCATGAGGCCTGTGCAGACTACTCAA |
| | | GAGGAGGACGGCTGTTCATGCCGGTTCCCAGAGGAGGAGGAAGGCGGC |
| | | TGCGAACTGCGCGTGAAATTCAGCCGCAGCGCAGATGCTCCAGCCTAC |
| | | AAGCAGGGGCAGAACCAGCTCTACAACGAACTCAATCTTGGTCGGAGA |
| | | GAGGAGTACGACGTGCTGGACAAGCGGAGAGGACGGGACCCAGAAATG |
| | | GGCGGGAAGCCGCGCAGAAAGAATCCCCAAGAGGGCCTGTACAACGAG |
| | | CTCCAAAAGGATAAGATGGCAGAAGCCTATAGCGAGATTGGTATGAAA |
| | | GGGGAACGCAGAAGAGGCAAAGGCCACGACGGACTGTACCAGGGACTC |
| | | AGCACCGCCACCAAGGACACCTATGACGCTCTTCACATGCAGGCCCTG |
| | | CCGCCTCGG |

BCMA_EBB-C1979-C12

| | | |
|---|---|---|
| BCMA_EBB- | 298 | EVQLVESGGGLVQPGRSLRLSCTASGFTFDDYAMHWVRQRPGKGLEWV |
| C1979- | | ASINWKGNSLAYGDSVKGRFAISRDNAKNTVFLQMNSLRTEDTAVYYC |
| C12-aa | | ASHQGVAYYNYAMDVWGRGTLVTVSSGGGGSGGGGSGGGGSEIVLTQS |
| ScFv | | PGTLSLSPGERATLSCRATQSIGSSFLAWYQQRPGQAPRLLIYGASQR |
| domain | | ATGIPDRFSGRGSGTDFTLTISRVEPEDSAVYYCQHYESSPSWTFGQG |
| | | TKVEIK |
| BCMA_EBB- | 299 | GAAGTGCAGCTCGTGGAGAGCGGGGGAGGATTGGTGCAGCCCGGAAGG |
| C1979- | | TCCCTGCGGCTCTCCTGCACTGCGTCTGGCTTCACCTTCGACGACTAC |
| C12-nt | | GCGATGCACTGGGTCAGACAGCGCCCGGGAAAGGGCCTGGAATGGGTC |
| ScFv | | GCCTCAATCAACTGGAAGGGAAACTCCCTGGCCTATGGCGACAGCGTG |
| domain | | AAGGGCCGCTTCGCCATTTCGCGCGACAACGCCAAGAACACCGTGTTT |
| | | CTGCAAATGAATTCCCTGCGGACCGAGGATACCGCTGTGTACTACTGC |
| | | GCCAGCCACCAGGGCGTGGCATACTATAACTACGCCATGGACGTGTGG |
| | | GGAAGAGGGACGCTCGTCACCGTGTCCTCCGGGGGCGGTGGATCGGGT |
| | | GGAGGAGGAAGCGGTGGCGGGGGCAGCGAAATCGTGCTGACTCAGAGC |
| | | CCGGGAACTCTTTCACTGTCCCCGGGAGAACGGGCCACTCTCTCGTGC |
| | | CGGGCCACCCAGTCCATCGGCTCCTCCTTCCTTGCCTGGTACCAGCAG |
| | | AGGCCAGGACAGGCGCCCCGCCTGCTGATCTACGGTGCTTCCCAACGC |
| | | GCCACTGGCATTCCTGACCGGTTCAGCGGCAGAGGGTCGGGAACCGAT |
| | | TTCACACTGACCATTTCCCGGGTGGAGCCCGAAGATTCGGCAGTCTAC |
| | | TACTGTCAGCATTACGAGTCCTCCCCTTCATGGACCTTCGGTCAAGGG |
| | | ACCAAAGTGGAGATCAAG |
| BCMA_EBB- | 300 | EVQLVESGGGLVQPGRSLRLSCTASGFTFDDYAMHWVRQRPGKGLEWV |
| C1979- | | ASINWKGNSLAYGDSVKGRFAISRDNAKNTVFLQMNSLRTEDTAVYYC |
| C12-aa | | ASHQGVAYYNYAMDVWGRGTLVTVSS |
| VH | | |
| BCMA_EBB- | 301 | EIVLTQSPGTLSLSPGERATLSCRATQSIGSSFLAWYQQRPGQAPRLL |
| C1979- | | IYGASQRATGIPDRFSGRGSGTDFTLTISRVEPEDSAVYYCQHYESSP |
| C12-aa | | SWTFGQGTKVEIK |
| VL | | |
| BCMA_EBB- | 302 | MALPVTALLLPLALLLHAARPEVQLVESGGGLVQPGRSLRLSCTASGF |
| C1979- | | TFDDYAMHWVRQRPGKGLEWVASINWKGNSLAYGDSVKGRFAISRDNA |
| C12-aa | | KNTVFLQMNSLRTEDTAVYYCASHQGVAYYNYAMDVWGRGTLVTVSSG |
| Full CART | | GGGSGGGGSGGGGSEIVLTQSPGTLSLSPGERATLSCRATQSIGSSFL |
| | | AWYQQRPGQAPRLLIYGASQRATGIPDRFSGRGSGTDFTLTISRVEPE |
| | | DSAVYYCQHYESSPSWTFGQGTKVEIKTTTPAPRPPTPAPTIASQPLS |
| | | LRPEACRPAAGGAVHTRGLDFACDIYIWAPLAGTCGVLLLSLVITLYC |
| | | KRGRKKLLYIFKQPFMRPVQTTQEEDGCSCRFPEEEEGGCELRVKFSR |
| | | SADAPAYKQGQNQLYNELNLGRREEYDVLDKRRGRDPEMGGKPRRKNP |
| | | QEGLYNELQKDKMAEAYSEIGMKGERRRGKGHDGLYQGLSTATKDTYD |
| | | ALHMQALPPR |
| BCMA_EBB- | 303 | ATGGCCCTCCCTGTCACCGCCCTGCTGCTTCCGCTGGCTCTTCTGCTC |
| C1979- | | CACGCCGCTCGGCCCGAAGTGCAGCTCGTGGAGAGCGGGGGAGGATTG |
| C12-nt | | GTGCAGCCCGGAAGGTCCCTGCGGCTCTCCTGCACTGCGTCTGGCTTC |
| Full CART | | ACCTTCGACGACTACGCGATGCACTGGGTCAGACAGCGCCCGGGAAAG |
| | | GGCCTGGAATGGGTCGCCTCAATCAACTGGAAGGGAAACTCCCTGGCC |
| | | TATGGCGACAGCGTGAAGGGCCGCTTCGCCATTTCGCGCGACAACGCC |
| | | AAGAACACCGTGTTTCTGCAAATGAATTCCCTGCGGACCGAGGATACC |
| | | GCTGTGTACTACTGCGCCAGCCACCAGGGCGTGGCATACTATAACTAC |
| | | GCCATGGACGTGTGGGGAAGAGGGACGCTCGTCACCGTGTCCTCCGGG |
| | | GGCGGTGGATCGGGTGGAGGAGGAAGCGGTGGCGGGGGCAGCGAAATC |
| | | GTGCTGACTCAGAGCCCGGGAACTCTTTCACTGTCCCCGGGAGAACGG |
| | | GCCACTCTCTCGTGCCGGGCCACCCAGTCCATCGGCTCCTCCTTCCTT |
| | | GCCTGGTACCAGCAGAGGCCAGGACAGGCGCCCCGCCTGCTGATCTAC |
| | | GGTGCTTCCCAACGCGCCACTGGCATTCCTGACCGGTTCAGCGGCAGA |
| | | GGGTCGGGAACCGATTTCACACTGACCATTTCCCGGGTGGAGCCCGAA |
| | | GATTCGGCAGTCTACTACTGTCAGCATTACGAGTCCTCCCCTTCATGG |
| | | ACCTTCGGTCAAGGGACCAAAGTGGAGATCAAGACCACTACCCCAGCA |
| | | CCGAGGCCACCCACCCCGGCTCCTACCATCGCCTCCCAGCCTCTGTCC |
| | | CTGCGTCCGGAGGCATGTAGACCCGCAGCTGGTGGGGCCGTGCATACC |
| | | CGGGGTCTTGACTTCGCCTGCGATATCTACATTTGGGCCCCTCTGGCT |
| | | GGTACTTGCGGGGTCCTGCTGCTTTCACTCGTGATCACTCTTTACTGT |
| | | AAGCGCGGTCGGAAGAAGCTGCTGTACATCTTTAAGCAACCCTTCATG |
| | | AGGCCTGTGCAGACTACTCAAGAGGAGGACGGCTGTTCATGCCGGTTC |
| | | CCAGAGGAGGAGGAAGGCGGCTGCGAACTGCGCGTGAAATTCAGCCGC |
| | | AGCGCAGATGCTCCAGCCTACAAGCAGGGGCAGAACCAGCTCTACAAC |
| | | GAACTCAATCTTGGTCGGAGAGAGGAGTACGACGTGCTGGACAAGCGG |
| | | AGAGGACGGGACCCAGAAATGGGCGGGAAGCCGCGCAGAAAGAATCCC |
| | | CAAGAGGGCCTGTACAACGAGCTCCAAAAGGATAAGATGGCAGAAGCC |
| | | TATAGCGAGATTGGTATGAAAGGGGAACGCAGAAGAGGCAAAGGCCAC |
| | | GACGGACTGTACCAGGGACTCAGCACCGCCACCAAGGACACCTATGAC |
| | | GCTCTTCACATGCAGGCCCTGCCGCCTCGG |

BCMA_EBB-C1980-G4

| | | |
|---|---|---|
| BCMA_EBB- | 304 | EVQLVESGGGLVQPGGSLRLSCAASGFTFSSYAMSWVRQAPGKGLEWV |
| C1980- | | SAISGSGGSTYYADSVKGRFTISRDNSKNTLYLQMNSLRAEDTAVYYC |
| G4-aa | | AKVVRDGMDVWGQGTTVTVSSGGGGSGGGGSGGGGSEIVLTQSPATLS |
| ScFv | | LSPGERATLSCRASQSVSSSYLAWYQQKPGQAPRLLIYGASSRATGIP |
| domain | | DRFSGNGSGTDFTLTISRLEPEDFAVYYCQQYGSPPRFTFGPGTKVDI |
| | | K |
| BCMA_EBB- | 305 | GAGGTGCAGTTGGTCGAAAGCGGGGGCGGGCTTGTGCAGCCTGGCGGA |
| C1980- | | TCACTGCGGCTGTCCTGCGCGGCATCAGGCTTCACGTTTTCTTCCTAC |
| G4-nt | | GCCATGTCCTGGGTGCGCCAGGCCCCTGGAAAGGGACTGGAATGGGTG |
| ScFv | | TCCGCGATTTCGGGGTCCGGCGGGAGCACCTACTACGCCGATTCCGTG |
| domain | | AAGGGCCGCTTCACTATCTCGCGGGACAACTCCAAGAACACCCTCTAC |
| | | CTCCAAATGAATAGCCTGCGGGCCGAGGATACCGCCGTCTACTATTGC |
| | | GCTAAGGTCGTGCGCGACGGAATGGACGTGTGGGGACAGGGTACCACC |
| | | GTGACAGTGTCCTCGGGGGGAGGCGGTAGCGGCGGAGGAGGAAGCGGT |
| | | GGTGGAGGTTCCGAGATTGTGCTGACTCAATCACCCGCGACCCTGAGC |
| | | CTGTCCCCCGGCGAAAGGGCCACTCTGTCCTGTCGGGCCAGCCAATCA |
| | | GTCTCCTCCTCGTACCTGGCCTGGTACCAGCAGAAGCCAGGACAGGCT |
| | | CCGAGACTCCTTATCTATGGCGCATCCTCCCGCGCCACCGGAATCCCG |
| | | GATAGGTTCTCGGGAAACGGATCGGGGACCGACTTCACTCTCACCATC |
| | | TCCCGGCTGGAACCGGAGGACTTCGCCGTGTACTACTGCCAGCAGTAC |
| | | GGCAGCCCGCCTAGATTCACTTTCGGCCCCGGCACCAAAGTGGACATC |
| | | AAG |
| BCMA_EBB- | 306 | EVQLVESGGGLVQPGGSLRLSCAASGFTFSSYAMSWVRQAPGKGLEWV |
| C1980- | | SAISGSGGSTYYADSVKGRFTISRDNSKNTLYLQMNSLRAEDTAVYYC |
| G4-aa | | AKVVRDGMDVWGQGTTVTVSS |
| VH | | |
| BCMA_EBB- | 307 | EIVLTQSPATLSLSPGERATLSCRASQSVSSSYLAWYQQKPGQAPRLL |
| C1980- | | IYGASSRATGIPDRFSGNGSGTDFTLTISRLEPEDFAVYYCQQYGSPP |
| G4-aa | | RFTFGPGTKVDIK |
| VL | | |
| BCMA_EBB- | 308 | MALPVTALLLPLALLLHAARPEVQLVESGGGLVQPGGSLRLSCAASGF |
| C1980- | | TFSSYAMSWVRQAPGKGLEWVSAISGSGGSTYYADSVKGRFTISRDNS |
| G4-aa | | KNTLYLQMNSLRAEDTAVYYCAKVVRDGMDVWGQGTTVTVSSGGGGSG |
| Full CART | | GGGSGGGGSEIVLTQSPATLSLSPGERATLSCRASQSVSSSYLAWYQQ |
| | | KPGQAPRLLIYGASSRATGIPDRFSGNGSGTDFTLTISRLEPEDFAVY |
| | | YCQQYGSPPRFTFGPGTKVDIKTTTPAPRPPTPAPTIASQPLSLRPEA |
| | | CRPAAGGAVHTRGLDFACDIYIWAPLAGTCGVLLLSLVITLYCKRGRK |
| | | KLLYIFKQPFMRPVQTTQEEDGCSCRFPEEEEGGCELRVKFSRSADAP |
| | | AYKQGQNQLYNELNLGRREEYDVLDKRRGRDPEMGGKPRRKNPQEGLY |
| | | NELQKDKMAEAYSEIGMKGERRRGKGHDGLYQGLSTATKDTYDALHMQ |
| | | ALPPR |
| BCMA_EBB- | 309 | ATGGCCCTCCCTGTCACCGCCCTGCTGCTTCCGCTGGCTCTTCTGCTC |
| C1980- | | CACGCCGCTCGGCCCGAGGTGCAGTTGGTCGAAAGCGGGGGCGGGCTT |
| G4-nt | | GTGCAGCCTGGCGGATCACTGCGGCTGTCCTGCGCGGCATCAGGCTTC |
| Full CART | | ACGTTTTCTTCCTACGCCATGTCCTGGGTGCGCCAGGCCCCTGGAAAG |
| | | GGACTGGAATGGGTGTCCGCGATTTCGGGGTCCGGCGGGAGCACCTAC |
| | | TACGCCGATTCCGTGAAGGGCCGCTTCACTATCTCGCGGGACAACTCC |
| | | AAGAACACCCTCTACCTCCAAATGAATAGCCTGCGGGCCGAGGATACC |
| | | GCCGTCTACTATTGCGCTAAGGTCGTGCGCGACGGAATGGACGTGTGG |
| | | GGACAGGGTACCACCGTGACAGTGTCCTCGGGGGGAGGCGGTAGCGGC |
| | | GGAGGAGGAAGCGGTGGTGGAGGTTCCGAGATTGTGCTGACTCAATCA |
| | | CCCGCGACCCTGAGCCTGTCCCCCGGCGAAAGGGCCACTCTGTCCTGT |
| | | CGGGCCAGCCAATCAGTCTCCTCCTCGTACCTGGCCTGGTACCAGCAG |
| | | AAGCCAGGACAGGCTCCGAGACTCCTTATCTATGGCGCATCCTCCCGC |
| | | GCCACCGGAATCCCGGATAGGTTCTCGGGAAACGGATCGGGGACCGAC |
| | | TTCACTCTCACCATCTCCCGGCTGGAACCGGAGGACTTCGCCGTGTAC |
| | | TACTGCCAGCAGTACGGCAGCCCGCCTAGATTCACTTTCGGCCCCGGC |
| | | ACCAAAGTGGACATCAAGACCACTACCCCAGCACCGAGGCCACCCACC |
| | | CCGGCTCCTACCATCGCCTCCCAGCCTCTGTCCCTGCGTCCGGAGGCA |
| | | TGTAGACCCGCAGCTGGTGGGGCCGTGCATACCCGGGGTCTTGACTTC |
| | | GCCTGCGATATCTACATTTGGGCCCCTCTGGCTGGTACTTGCGGGGTC |
| | | CTGCTGCTTTCACTCGTGATCACTCTTTACTGTAAGCGCGGTCGGAAG |
| | | AAGCTGCTGTACATCTTTAAGCAACCCTTCATGAGGCCTGTGCAGACT |
| | | ACTCAAGAGGAGGACGGCTGTTCATGCCGGTTCCCAGAGGAGGAGGAA |
| | | GGCGGCTGCGAACTGCGCGTGAAATTCAGCCGCAGCGCAGATGCTCCA |
| | | GCCTACAAGCAGGGGCAGAACCAGCTCTACAACGAACTCAATCTTGGT |
| | | CGGAGAGAGGAGTACGACGTGCTGGACAAGCGGAGAGGACGGGACCCA |
| | | GAAATGGGCGGGAAGCCGCGCAGAAAGAATCCCCAAGAGGGCCTGTAC |
| | | AACGAGCTCCAAAAGGATAAGATGGCAGAAGCCTATAGCGAGATTGGT |
| | | ATGAAAGGGGAACGCAGAAGAGGCAAAGGCCACGACGGACTGTACCAG |
| | | GGACTCAGCACCGCCACCAAGGACACCTATGACGCTCTTCACATGCAG |
| | | GCCCTGCCGCCTCGG |

BCMA_EBB-C1980-D2

| | | |
|---|---|---|
| BCMA_EBB- | 310 | EVQLLESGGGLVQPGGSLRLSCAASGFTFSSYAMSWVRQAPGKGLEWV |
| C1980- | | SAISGSGGSTYYADSVKGRFTISRDNSKNTLYLQMNSLRAEDTAVYYC |
| D2-aa | | AKIPQTGTFDYWGQGTLVTVSSGGGGSGGGGSGGGGSEIVLTQSPGTL |
| ScFv | | SLSPGERATLSCRASQSVSSSYLAWYQQRPGQAPRLLIYGASSRATGI |
| domain | | PDRFSGSGSGTDFTLTISRLEPEDFAVYYCQHYGSSPSWTFGQGTRLE |
| | | IK |
| BCMA_EBB- | 311 | GAAGTGCAGCTGCTGGAGTCCGGCGGTGGATTGGTGCAACCGGGGGGA |
| C1980- | | TCGCTCAGACTGTCCTGTGCGGCGTCAGGCTTCACCTTCTCGAGCTAC |
| D2-nt | | GCCATGTCATGGGTCAGACAGGCCCCTGGAAAGGGTCTGGAATGGGTG |
| ScFv | | TCCGCCATTTCCGGGAGCGGGGGATCTACATACTACGCCGATAGCGTG |
| domain | | AAGGGCCGCTTCACCATTTCCCGGGACAACTCCAAGAACACTCTCTAT |
| | | CTGCAAATGAACTCCCTCCGCGCTGAGGACACTGCCGTGTACTACTGC |
| | | GCCAAAATCCCTCAGACCGGCACCTTCGACTACTGGGGACAGGGGACT |
| | | CTGGTCACCGTCAGCAGCGGTGGCGGAGGTTCGGGGGGAGGAGGAAGC |
| | | GGCGGCGGAGGGTCCGAGATTGTGCTGACCCAGTCACCCGGCACTTTG |
| | | TCCCTGTCGCCTGGAGAAAGGGCCACCCTTTCCTGCCGGGCATCCCAA |
| | | TCCGTGTCCTCCTCGTACCTGGCCTGGTACCAGCAGAGGCCCGGACAG |
| | | GCCCCACGGCTTCTGATCTACGGAGCAAGCAGCCGCGCGACCGGTATC |
| | | CCGGACCGGTTTTCGGGCTCGGGCTCAGGAACTGACTTCACCCTCACC |
| | | ATCTCCCGCCTGGAACCCGAAGATTTCGCTGTGTATTACTGCCAGCAC |
| | | TACGGCAGCTCCCCGTCCTGGACGTTCGGCCAGGGAACTCGGCTGGAG |
| | | ATCAAG |
| BCMA_EBB- | 312 | EVQLLESGGGLVQPGGSLRLSCAASGFTFSSYAMSWVRQAPGKGLEWV |
| C1980- | | SAISGSGGSTYYADSVKGRFTISRDNSKNTLYLQMNSLRAEDTAVYYC |
| D2-aa | | AKIPQTGTFDYWGQGTLVTVSS |
| VH | | |
| BCMA_EBB- | 313 | EIVLTQSPGTLSLSPGERATLSCRASQSVSSSYLAWYQQRPGQAPRLL |
| C1980- | | IYGASSRATGIPDRFSGSGSGTDFTLTISRLEPEDFAVYYCQHYGSSP |
| D2-aa | | SWTFGQGTRLEIK |
| VL | | |
| BCMA_EBB- | 314 | MALPVTALLLPLALLLHAARPEVQLLESGGGLVQPGGSLRLSCAASGF |
| C1980- | | TFSSYAMSWVRQAPGKGLEWVSAISGSGGSTYYADSVKGRFTISRDNS |
| D2-aa | | KNTLYLQMNSLRAEDTAVYYCAKIPQTGTFDYWGQGTLVTVSSGGGGS |
| Full CART | | GGGGSGGGGSEIVLTQSPGTLSLSPGERATLSCRASQSVSSSYLAWYQ |
| | | QRPGQAPRLLIYGASSRATGIPDRFSGSGSGTDFTLTISRLEPEDFAV |
| | | YYCQHYGSSPSWTFGQGTRLEIKTTTPAPRPPTPAPTIASQPLSLRPE |
| | | ACRPAAGGAVHTRGLDFACDIYIWAPLAGTCGVLLLSLVITLYCKRGR |
| | | KKLLYIFKQPFMRPVQTTQEEDGCSCRFPEEEEGGCELRVKFSRSADA |
| | | PAYKQGQNQLYNELNLGRREEYDVLDKRRGRDPEMGGKPRRKNPQEGL |
| | | YNELQKDKMAEAYSEIGMKGERRRGKGHDGLYQGLSTATKDTYDALHM |
| | | QALPPR |
| BCMA_EBB- | 315 | ATGGCCCTCCCTGTCACCGCCCTGCTGCTTCCGCTGGCTCTTCTGCTC |
| C1980- | | CACGCCGCTCGGCCCGAAGTGCAGCTGCTGGAGTCCGGCGGTGGATTG |
| D2-nt | | GTGCAACCGGGGGGATCGCTCAGACTGTCCTGTGCGGCGTCAGGCTTC |
| Full CART | | ACCTTCTCGAGCTACGCCATGTCATGGGTCAGACAGGCCCCTGGAAAG |
| | | GGTCTGGAATGGGTGTCCGCCATTTCCGGGAGCGGGGGATCTACATAC |
| | | TACGCCGATAGCGTGAAGGGCCGCTTCACCATTTCCCGGGACAACTCC |
| | | AAGAACACTCTCTATCTGCAAATGAACTCCCTCCGCGCTGAGGACACT |
| | | GCCGTGTACTACTGCGCCAAAATCCCTCAGACCGGCACCTTCGACTAC |
| | | TGGGGACAGGGGACTCTGGTCACCGTCAGCAGCGGTGGCGGAGGTTCG |
| | | GGGGGAGGAGGAAGCGGCGGCGGAGGGTCCGAGATTGTGCTGACCCAG |
| | | TCACCCGGCACTTTGTCCCTGTCGCCTGGAGAAAGGGCCACCCTTTCC |
| | | TGCCGGGCATCCCAATCCGTGTCCTCCTCGTACCTGGCCTGGTACCAG |
| | | CAGAGGCCCGGACAGGCCCCACGGCTTCTGATCTACGGAGCAAGCAGC |
| | | CGCGCGACCGGTATCCCGGACCGGTTTTCGGGCTCGGGCTCAGGAACT |
| | | GACTTCACCCTCACCATCTCCCGCCTGGAACCCGAAGATTTCGCTGTG |
| | | TATTACTGCCAGCACTACGGCAGCTCCCCGTCCTGGACGTTCGGCCAG |
| | | GGAACTCGGCTGGAGATCAAGACCACTACCCCAGCACCGAGGCCACCC |
| | | ACCCCGGCTCCTACCATCGCCTCCCAGCCTCTGTCCCTGCGTCCGGAG |
| | | GCATGTAGACCCGCAGCTGGTGGGGCCGTGCATACCCGGGGTCTTGAC |
| | | TTCGCCTGCGATATCTACATTTGGGCCCCTCTGGCTGGTACTTGCGGG |
| | | GTCCTGCTGCTTTCACTCGTGATCACTCTTTACTGTAAGCGCGGTCGG |
| | | AAGAAGCTGCTGTACATCTTTAAGCAACCCTTCATGAGGCCTGTGCAG |
| | | ACTACTCAAGAGGAGGACGGCTGTTCATGCCGGTTCCCAGAGGAGGAG |
| | | GAAGGCGGCTGCGAACTGCGCGTGAAATTCAGCCGCAGCGCAGATGCT |
| | | CCAGCCTACAAGCAGGGGCAGAACCAGCTCTACAACGAACTCAATCTT |
| | | GGTCGGAGAGAGGAGTACGACGTGCTGGACAAGCGGAGAGGACGGGAC |
| | | CCAGAAATGGGCGGGAAGCCGCGCAGAAAGAATCCCCAAGAGGGCCTG |
| | | TACAACGAGCTCCAAAAGGATAAGATGGCAGAAGCCTATAGCGAGATT |
| | | GGTATGAAAGGGGAACGCAGAAGAGGCAAAGGCCACGACGGACTGTAC |
| | | CAGGGACTCAGCACCGCCACCAAGGACACCTATGACGCTCTTCACATG |
| | | CAGGCCCTGCCGCCTCGG |

BCMA_EBB-C1978-A10

| | | |
|---|---|---|
| BCMA_EBB- | 316 | EVQLVETGGGLVQPGGSLRLSCAASGFTFSSYAMSWVRQAPGKGLEWV |
| C1978- | | SAISGSGGSTYYADSVKGRFTMSRENDKNSVFLQMNSLRVEDTGVYYC |
| A10-aa | | ARANYKRELRYYYGMDVWGQGTMVTVSSGGGGSGGGGSGGGGSEIVMT |
| ScFv | | QSPGTLSLSPGESATLSCRASQRVASNYLAWYQHKPGQAPSLLISGAS |
| domain | | SRATGVPDRFSGSGSGTDFTLAISRLEPEDSAVYYCQHYDSSPSWTFG |
| | | QGTKVEIK |
| BCMA_EBB- | 317 | GAAGTGCAACTGGTGGAAACCGGTGGAGGACTCGTGCAGCCTGGCGGC |
| C1978- | | AGCCTCCGGCTGAGCTGCGCCGCTTCGGGATTCACCTTTTCCTCCTAC |
| A10-nt | | GCGATGTCTTGGGTCAGACAGGCCCCCGGAAAGGGGCTGGAATGGGTG |
| ScFv | | TCAGCCATCTCCGGCTCCGGCGGATCAACGTACTACGCCGACTCCGTG |
| domain | | AAAGGCCGGTTCACCATGTCGCGCGAGAATGACAAGAACTCCGTGTTC |
| | | CTGCAAATGAACTCCCTGAGGGTGGAGGACACCGGAGTGTACTATTGT |
| | | GCGCGCGCCAACTACAAGAGAGAGCTGCGGTACTACTACGGAATGGAC |
| | | GTCTGGGGACAGGGAACTATGGTGACCGTGTCATCCGGTGGAGGGGGA |
| | | AGCGGCGGTGGAGGCAGCGGGGGCGGGGGTTCAGAAATTGTCATGACC |
| | | CAGTCCCCGGGAACTCTTTCCCTCTCCCCCGGGGAATCCGCGACTTTG |
| | | TCCTGCCGGGCCAGCCAGCGCGTGGCCTCGAACTACCTCGCATGGTAC |
| | | CAGCATAAGCCAGGCCAAGCCCCTTCCCTGCTGATTTCCGGGGCTAGC |
| | | AGCCGCGCCACTGGCGTGCCGGATAGGTTCTCGGGAAGCGGCTCGGGT |
| | | ACCGATTTCACCCTGGCAATCTCGCGGCTGGAACCGGAGGATTCGGCC |
| | | GTGTACTACTGCCAGCACTATGACTCATCCCCCTCCTGGACATTCGGA |
| | | CAGGGCACCAAGGTCGAGATCAAG |
| BCMA_EBB- | 318 | EVQLVETGGGLVQPGGSLRLSCAASGFTFSSYAMSWVRQAPGKGLEWV |
| C1978- | | SAISGSGGSTYYADSVKGRFTMSRENDKNSVFLQMNSLRVEDTGVYYC |
| A10-aa | | ARANYKRELRYYYGMDVWGQGTMVTVSS |
| VH | | |
| BCMA_EBB- | 319 | EIVMTQSPGTLSLSPGESATLSCRASQRVASNYLAWYQHKPGQAPSLL |
| C1978- | | ISGASSRATGVPDRFSGSGSGTDFTLAISRLEPEDSAVYYCQHYDSSP |
| A10-aa | | SWTFGQGTKVEIK |
| VL | | |
| BCMA_EBB- | 320 | MALPVTALLLPLALLLHAARPEVQLVETGGGLVQPGGSLRLSCAASGF |
| C1978- | | TFSSYAMSWVRQAPGKGLEWVSAISGSGGSTYYADSVKGRFTMSREND |
| A10-aa | | KNSVFLQMNSLRVEDTGVYYCARANYKRELRYYYGMDVWGQGTMVTVS |
| Full CART | | SGGGGSGGGGSGGGGSEIVMTQSPGTLSLSPGESATLSCRASQRVASN |
| | | YLAWYQHKPGQAPSLLISGASSRATGVPDRFSGSGSGTDFTLAISRLE |
| | | PEDSAVYYCQHYDSSPSWTFGQGTKVEIKTTTPAPRPPTPAPTIASQP |
| | | LSLRPEACRPAAGGAVHTRGLDFACDIYIWAPLAGTCGVLLLSLVITL |
| | | YCKRGRKKLLYIFKQPFMRPVQTTQEEDGCSCRFPEEEEGGCELRVKF |
| | | SRSADAPAYKQGQNQLYNELNLGRREEYDVLDKRRGRDPEMGGKPRRK |
| | | NPQEGLYNELQKDKMAEAYSEIGMKGERRRGKGHDGLYQGLSTATKDT |
| | | YDALHMQALPPR |
| BCMA_EBB- | 321 | ATGGCCCTCCCTGTCACCGCCCTGCTGCTTCCGCTGGCTCTTCTGCTC |
| C1978- | | CACGCCGCTCGGCCCGAAGTGCAACTGGTGGAAACCGGTGGAGGACTC |
| A10-nt | | GTGCAGCCTGGCGGCAGCCTCCGGCTGAGCTGCGCCGCTTCGGGATTC |
| Full CART | | ACCTTTTCCTCCTACGCGATGTCTTGGGTCAGACAGGCCCCCGGAAAG |
| | | GGGCTGGAATGGGTGTCAGCCATCTCCGGCTCCGGCGGATCAACGTAC |
| | | TACGCCGACTCCGTGAAAGGCCGGTTCACCATGTCGCGCGAGAATGAC |
| | | AAGAACTCCGTGTTCCTGCAAATGAACTCCCTGAGGGTGGAGGACACC |
| | | GGAGTGTACTATTGTGCGCGCGCCAACTACAAGAGAGAGCTGCGGTAC |
| | | TACTACGGAATGGACGTCTGGGGACAGGGAACTATGGTGACCGTGTCA |
| | | TCCGGTGGAGGGGGAAGCGGCGGTGGAGGCAGCGGGGGCGGGGGTTCA |
| | | GAAATTGTCATGACCCAGTCCCCGGGAACTCTTTCCCTCTCCCCCGGG |
| | | GAATCCGCGACTTTGTCCTGCCGGGCCAGCCAGCGCGTGGCCTCGAAC |
| | | TACCTCGCATGGTACCAGCATAAGCCAGGCCAAGCCCCTTCCCTGCTG |
| | | ATTTCCGGGGCTAGCAGCCGCGCCACTGGCGTGCCGGATAGGTTCTCG |
| | | GGAAGCGGCTCGGGTACCGATTTCACCCTGGCAATCTCGCGGCTGGAA |
| | | CCGGAGGATTCGGCCGTGTACTACTGCCAGCACTATGACTCATCCCCC |
| | | TCCTGGACATTCGGACAGGGCACCAAGGTCGAGATCAAGACCACTACC |
| | | CCAGCACCGAGGCCACCCACCCCGGCTCCTACCATCGCCTCCCAGCCT |
| | | CTGTCCCTGCGTCCGGAGGCATGTAGACCCGCAGCTGGTGGGGCCGTG |
| | | CATACCCGGGGTCTTGACTTCGCCTGCGATATCTACATTTGGGCCCCT |
| | | CTGGCTGGTACTTGCGGGGTCCTGCTGCTTTCACTCGTGATCACTCTT |
| | | TACTGTAAGCGCGGTCGGAAGAAGCTGCTGTACATCTTTAAGCAACCC |
| | | TTCATGAGGCCTGTGCAGACTACTCAAGAGGAGGACGGCTGTTCATGC |
| | | CGGTTCCCAGAGGAGGAGGAAGGCGGCTGCGAACTGCGCGTGAAATTC |
| | | AGCCGCAGCGCAGATGCTCCAGCCTACAAGCAGGGGCAGAACCAGCTC |
| | | TACAACGAACTCAATCTTGGTCGGAGAGAGGAGTACGACGTGCTGGAC |
| | | AAGCGGAGAGGACGGGACCCAGAAATGGGCGGGAAGCCGCGCAGAAAG |
| | | AATCCCCAAGAGGGCCTGTACAACGAGCTCCAAAAGGATAAGATGGCA |
| | | GAAGCCTATAGCGAGATTGGTATGAAAGGGGAACGCAGAAGAGGCAAA |
| | | GGCCACGACGGACTGTACCAGGGACTCAGCACCGCCACCAAGGACACC |
| | | TATGACGCTCTTCACATGCAGGCCCTGCCGCCTCGG |

BCMA_EBB-C1978-D4

| | | |
|---|---|---|
| BCMA_EBB- | 322 | EVQLLETGGGLVQPGGSLRLSCAASGFSFSSYAMSWVRQAPGKGLEWV |
| C1978- | | SAISGSGGSTYYADSVKGRFTISRDNSKNTLYLQMNSLRAEDTAVYYC |
| D4-aa | | AKALVGATGAFDIWGQGTLVTVSSGGGGSGGGGSGGGGSEIVLTQSPG |
| ScFv | | TLSLSPGERATLSCRASQSLSSNFLAWYQQKPGQAPGLLIYGASNWAT |
| domain | | GTPDRFSGSGSGTDFTLTITRLEPEDFAVYYCQYYGTSPMYTFGQGTK |
| | | VEIK |
| BCMA_EBB- | 323 | GAAGTGCAGCTGCTCGAAACCGGTGGAGGGCTGGTGCAGCCAGGGGGC |
| C1978- | | TCCCTGAGGCTTTCATGCGCCGCTAGCGGATTCTCCTTCTCCTCTTAC |
| D4-nt | | GCCATGTCGTGGGTCCGCCAAGCCCCTGGAAAAGGCCTGGAATGGGTG |
| ScFv | | TCCGCGATTTCCGGGAGCGGAGGTTCGACCTATTACGCCGACTCCGTG |
| domain | | AAGGGCCGCTTTACCATCTCCCGGGATAACTCCAAGAACACTCTGTAC |
| | | CTCCAAATGAACTCGCTGAGAGCCGAGGACACCGCCGTGTATTACTGC |
| | | GCGAAGGCGCTGGTCGGCGCGACTGGGGCATTCGACATCTGGGGACAG |
| | | GGAACTCTTGTGACCGTGTCGAGCGGAGGCGGCGGCTCCGGCGGAGGA |
| | | GGGAGCGGGGGCGGTGGTTCCGAAATCGTGTTGACTCAGTCCCCGGGA |
| | | ACCCTGAGCTTGTCACCCGGGGAGCGGGCCACTCTCTCCTGTCGCGCC |
| | | TCCCAATCGCTCTCATCCAATTTCCTGGCCTGGTACCAGCAGAAGCCC |
| | | GGACAGGCCCCGGGCCTGCTCATCTACGGCGCTTCAAACTGGGCAACG |
| | | GGAACCCCTGATCGGTTCAGCGGAAGCGGATCGGGTACTGACTTTACC |
| | | CTGACCATCACCAGACTGGAACCGGAGGACTTCGCCGTGTACTACTGC |
| | | CAGTACTACGGCACCTCCCCCATGTACACATTCGGACAGGGTACCAAG |
| | | GTCGAGATTAAG |
| BCMA_EBB- | 324 | EVQLLETGGGLVQPGGSLRLSCAASGFSFSSYAMSWVRQAPGKGLEWV |
| C1978- | | SAISGSGGSTYYADSVKGRFTISRDNSKNTLYLQMNSLRAEDTAVYYC |
| D4-aa | | AKALVGATGAFDIWGQGTLVTVSS |
| VH | | |
| BCMA_EBB- | 325 | EIVLTQSPGTLSLSPGERATLSCRASQSLSSNFLAWYQQKPGQAPGLL |
| C1978- | | IYGASNWATGTPDRFSGSGSGTDFTLTITRLEPEDFAVYYCQYYGTSP |
| D4-aa | | MYTFGQGTKVEIK |
| VL | | |
| BCMA_EBB- | 326 | MALPVTALLLPLALLLHAARPEVQLLETGGGLVQPGGSLRLSCAASGF |
| C1978- | | SFSSYAMSWVRQAPGKGLEWVSAISGSGGSTYYADSVKGRFTISRDNS |
| D4-aa | | KNTLYLQMNSLRAEDTAVYYCAKALVGATGAFDIWGQGTLVTVSSGGG |
| Full CART | | GSGGGGSGGGGSEIVLTQSPGTLSLSPGERATLSCRASQSLSSNFLAW |
| | | YQQKPGQAPGLLIYGASNWATGTPDRFSGSGSGTDFTLTITRLEPEDF |
| | | AVYYCQYYGTSPMYTFGQGTKVEIKTTTPAPRPPTPAPTIASQPLSLR |
| | | PEACRPAAGGAVHTRGLDFACDIYIWAPLAGTCGVLLLSLVITLYCKR |
| | | GRKKLLYIFKQPFMRPVQTTQEEDGCSCRFPEEEEGGCELRVKFSRSA |
| | | DAPAYKQGQNQLYNELNLGRREEYDVLDKRRGRDPEMGGKPRRKNPQE |
| | | GLYNELQKDKMAEAYSEIGMKGERRRGKGHDGLYQGLSTATKDTYDAL |
| | | HMQALPPR |
| BCMA_EBB- | 327 | ATGGCCCTCCCTGTCACCGCCCTGCTGCTTCCGCTGGCTCTTCTGCTC |
| C1978- | | CACGCCGCTCGGCCCGAAGTGCAGCTGCTCGAAACCGGTGGAGGGCTG |
| D4-nt | | GTGCAGCCAGGGGGCTCCCTGAGGCTTTCATGCGCCGCTAGCGGATTC |
| Full CART | | TCCTTCTCCTCTTACGCCATGTCGTGGGTCCGCCAAGCCCCTGGAAAA |
| | | GGCCTGGAATGGGTGTCCGCGATTTCCGGGAGCGGAGGTTCGACCTAT |
| | | TACGCCGACTCCGTGAAGGGCCGCTTTACCATCTCCCGGGATAACTCC |
| | | AAGAACACTCTGTACCTCCAAATGAACTCGCTGAGAGCCGAGGACACC |
| | | GCCGTGTATTACTGCGCGAAGGCGCTGGTCGGCGCGACTGGGGCATTC |
| | | GACATCTGGGGACAGGGAACTCTTGTGACCGTGTCGAGCGGAGGCGGC |
| | | GGCTCCGGCGGAGGAGGGAGCGGGGGCGGTGGTTCCGAAATCGTGTTG |
| | | ACTCAGTCCCCGGGAACCCTGAGCTTGTCACCCGGGGAGCGGGCCACT |
| | | CTCTCCTGTCGCGCCTCCCAATCGCTCTCATCCAATTTCCTGGCCTGG |
| | | TACCAGCAGAAGCCCGGACAGGCCCCGGGCCTGCTCATCTACGGCGCT |
| | | TCAAACTGGGCAACGGGAACCCCTGATCGGTTCAGCGGAAGCGGATCG |
| | | GGTACTGACTTTACCCTGACCATCACCAGACTGGAACCGGAGGACTTC |
| | | GCCGTGTACTACTGCCAGTACTACGGCACCTCCCCCATGTACACATTC |
| | | GGACAGGGTACCAAGGTCGAGATTAAGACCACTACCCCAGCACCGAGG |
| | | CCACCCACCCCGGCTCCTACCATCGCCTCCCAGCCTCTGTCCCTGCGT |
| | | CCGGAGGCATGTAGACCCGCAGCTGGTGGGGCCGTGCATACCCGGGGT |
| | | CTTGACTTCGCCTGCGATATCTACATTTGGGCCCCTCTGGCTGGTACT |
| | | TGCGGGGTCCTGCTGCTTTCACTCGTGATCACTCTTTACTGTAAGCGC |
| | | GGTCGGAAGAAGCTGCTGTACATCTTTAAGCAACCCTTCATGAGGCCT |
| | | GTGCAGACTACTCAAGAGGAGGACGGCTGTTCATGCCGGTTCCCAGAG |
| | | GAGGAGGAAGGCGGCTGCGAACTGCGCGTGAAATTCAGCCGCAGCGCA |
| | | GATGCTCCAGCCTACAAGCAGGGGCAGAACCAGCTCTACAACGAACTC |
| | | AATCTTGGTCGGAGAGAGGAGTACGACGTGCTGGACAAGCGGAGAGGA |
| | | CGGGACCCAGAAATGGGCGGGAAGCCGCGCAGAAAGAATCCCCAAGAG |
| | | GGCCTGTACAACGAGCTCCAAAAGGATAAGATGGCAGAAGCCTATAGC |
| | | GAGATTGGTATGAAAGGGGAACGCAGAAGAGGCAAAGGCCACGACGGA |
| | | CTGTACCAGGGACTCAGCACCGCCACCAAGGACACCTATGACGCTCTT |
| | | CACATGCAGGCCCTGCCGCCTCGG |

BCMA_EBB-C1980-A2

| | | |
|---|---|---|
| BCMA_EBB- | 328 | EVQLLESGGGLVQPGGSLRLSCAASGFTFSSYAMSWVRQAPGKGLEWV |
| C1980- | | SAISGSGGSTYYADSVKGRFTISRDNSKNTLYLQMNSLRAEDTAVYYC |
| A2-aa | | VLWFGEGFDPWGQGTLVTVSSGGGGSGGGGSGGGGSDIVLTQSPLSLP |
| ScFv | | VTPGEPASISCRSSQSLLHSNGYNYLDWYLQKPGQSPQLLIYLGSNRA |
| domain | | SGVPDRFSGSGSGTDFTLKISRVEAEDVGVYYCMQALQTPLTFGGGTK |
| | | VDIK |
| BCMA_EBB- | 329 | GAAGTGCAGCTGCTTGAGAGCGGTGGAGGTCTGGTGCAGCCCGGGGGA |
| C1980- | | TCACTGCGCCTGTCCTGTGCCGCGTCCGGTTTCACTTTCTCCTCGTAC |
| A2-nt | | GCCATGTCGTGGGTCAGACAGGCACCGGGAAAGGGACTGGAATGGGTG |
| ScFv | | TCAGCCATTTCGGGTTCGGGGGGCAGCACCTACTACGCTGACTCCGTG |
| domain | | AAGGGCCGGTTCACCATTTCCCGCGACAACTCCAAGAACACCTTGTAC |
| | | CTCCAAATGAACTCCCTGCGGGCCGAAGATACCGCCGTGTATTACTGC |
| | | GTGCTGTGGTTCGGAGAGGGATTCGACCCGTGGGGACAAGGAACACTC |
| | | GTGACTGTGTCATCCGGCGGAGGCGGCAGCGGTGGCGGCGGTTCCGGC |
| | | GGCGGCGGATCTGACATCGTGTTGACCCAGTCCCCTCTGAGCCTGCCG |
| | | GTCACTCCTGGCGAACCAGCCAGCATCTCCTGCCGGTCGAGCCAGTCC |
| | | CTCCTGCACTCCAATGGGTACAACTACCTCGATTGGTATCTGCAAAAG |
| | | CCGGGCCAGAGCCCCCAGCTGCTGATCTACCTTGGGTCAAACCGCGCT |
| | | TCCGGGGTGCCTGATAGATTCTCCGGGTCCGGGAGCGGAACCGACTTT |
| | | ACCCTGAAAATCTCGAGGGTGGAGGCCGAGGACGTCGGAGTGTACTAC |
| | | TGCATGCAGGCGCTCCAGACTCCCCTGACCTTCGGAGGAGGAACGAAG |
| | | GTCGACATCAAGA |
| BCMA_EBB- | 330 | EVQLLESGGGLVQPGGSLRLSCAASGFTFSSYAMSWVRQAPGKGLEWV |
| C1980- | | SAISGSGGSTYYADSVKGRFTISRDNSKNTLYLQMNSLRAEDTAVYYC |
| A2-aa | | VLWFGEGFDPWGQGTLVTVSS |
| VH | | |
| BCMA_EBB- | 331 | DIVLTQSPLSLPVTPGEPASISCRSSQSLLHSNGYNYLDWYLQKPGQS |
| C1980- | | PQLLIYLGSNRASGVPDRFSGSGSGTDFTLKISRVEAEDVGVYYCMQA |
| A2-aa | | LQTPLTFGGGTKVDIK |
| VL | | |
| BCMA_EBB- | 332 | MALPVTALLLPLALLLHAARPEVQLLESGGGLVQPGGSLRLSCAASGF |
| C1980- | | TFSSYAMSWVRQAPGKGLEWVSAISGSGGSTYYADSVKGRFTISRDNS |
| A2-aa | | KNTLYLQMNSLRAEDTAVYYCVLWFGEGFDPWGQGTLVTVSSGGGGSG |
| Full CART | | GGGSGGGGSDIVLTQSPLSLPVTPGEPASISCRSSQSLLHSNGYNYLD |
| | | WYLQKPGQSPQLLIYLGSNRASGVPDRFSGSGSGTDFTLKISRVEAED |
| | | VGVYYCMQALQTPLTFGGGTKVDIKTTTPAPRPPTPAPTIASQPLSLR |
| | | PEACRPAAGGAVHTRGLDFACDIYIWAPLAGTCGVLLLSLVITLYCKR |
| | | GRKKLLYIFKQPFMRPVQTTQEEDGCSCRFPEEEEGGCELRVKFSRSA |
| | | DAPAYKQGQNQLYNELNLGRREEYDVLDKRRGRDPEMGGKPRRKNPQE |
| | | GLYNELQKDKMAEAYSEIGMKGERRRGKGHDGLYQGLSTATKDTYDAL |
| | | HMQALPPR |
| BCMA_EBB- | 333 | ATGGCCCTCCCTGTCACCGCCCTGCTGCTTCCGCTGGCTCTTCTGCTC |
| C1980- | | CACGCCGCTCGGCCCGAAGTGCAGCTGCTTGAGAGCGGTGGAGGTCTG |
| A2-nt | | GTGCAGCCCGGGGGATCACTGCGCCTGTCCTGTGCCGCGTCCGGTTTC |
| Full CART | | ACTTTCTCCTCGTACGCCATGTCGTGGGTCAGACAGGCACCGGGAAAG |
| | | GGACTGGAATGGGTGTCAGCCATTTCGGGTTCGGGGGGCAGCACCTAC |
| | | TACGCTGACTCCGTGAAGGGCCGGTTCACCATTTCCCGCGACAACTCC |
| | | AAGAACACCTTGTACCTCCAAATGAACTCCCTGCGGGCCGAAGATACC |
| | | GCCGTGTATTACTGCGTGCTGTGGTTCGGAGAGGGATTCGACCCGTGG |
| | | GGACAAGGAACACTCGTGACTGTGTCATCCGGCGGAGGCGGCAGCGGT |
| | | GGCGGCGGTTCCGGCGGCGGCGGATCTGACATCGTGTTGACCCAGTCC |
| | | CCTCTGAGCCTGCCGGTCACTCCTGGCGAACCAGCCAGCATCTCCTGC |
| | | CGGTCGAGCCAGTCCCTCCTGCACTCCAATGGGTACAACTACCTCGAT |
| | | TGGTATCTGCAAAAGCCGGGCCAGAGCCCCCAGCTGCTGATCTACCTT |
| | | GGGTCAAACCGCGCTTCCGGGGTGCCTGATAGATTCTCCGGGTCCGGG |
| | | AGCGGAACCGACTTTACCCTGAAAATCTCGAGGGTGGAGGCCGAGGAC |
| | | GTCGGAGTGTACTACTGCATGCAGGCGCTCCAGACTCCCCTGACCTTC |
| | | GGAGGAGGAACGAAGGTCGACATCAAGACCACTACCCCAGCACCGAGG |
| | | CCACCCACCCCGGCTCCTACCATCGCCTCCCAGCCTCTGTCCCTGCGT |
| | | CCGGAGGCATGTAGACCCGCAGCTGGTGGGGCCGTGCATACCCGGGGT |
| | | CTTGACTTCGCCTGCGATATCTACATTTGGGCCCCTCTGGCTGGTACT |
| | | TGCGGGGTCCTGCTGCTTTCACTCGTGATCACTCTTTACTGTAAGCGC |
| | | GGTCGGAAGAAGCTGCTGTACATCTTTAAGCAACCCTTCATGAGGCCT |
| | | GTGCAGACTACTCAAGAGGAGGACGGCTGTTCATGCCGGTTCCCAGAG |
| | | GAGGAGGAAGGCGGCTGCGAACTGCGCGTGAAATTCAGCCGCAGCGCA |
| | | GATGCTCCAGCCTACAAGCAGGGGCAGAACCAGCTCTACAACGAACTC |
| | | AATCTTGGTCGGAGAGAGGAGTACGACGTGCTGGACAAGCGGAGAGGA |
| | | CGGGACCCAGAAATGGGCGGGAAGCCGCGCAGAAAGAATCCCCAAGAG |
| | | GGCCTGTACAACGAGCTCCAAAAGGATAAGATGGCAGAAGCCTATAGC |
| | | GAGATTGGTATGAAAGGGGAACGCAGAAGAGGCAAAGGCCACGACGGA |
| | | CTGTACCAGGGACTCAGCACCGCCACCAAGGACACCTATGACGCTCTT |
| | | CACATGCAGGCCCTGCCGCCTCGG |

BCMA_EBB-C1981-C3

| | | |
|---|---|---|
| BCMA_EBB- | 334 | QVQLVESGGGLVQPGGSLRLSCAASGFTFSSYAMSWVRQAPGKGLEWV |
| C1981- | | SAISGSGGSTYYADSVKGRFTISRDNSKNTLYLQMNSLRAEDTAVYYC |
| C3-aa | | AKVGYDSSGYYRDYYGMDVWGQGTTVTVSSGGGGSGGGGSGGGGSEIV |
| ScFv | | LTQSPGTLSLSPGERATLSCRASQSVSSSYLAWYQQKPGQAPRLLIYG |
| domain | | TSSRATGISDRFSGSGSGTDFTLTISRLEPEDFAVYYCQHYGNSPPKF |
| | | TFGPGTKLEIK |
| BCMA_EBB- | 335 | CAAGTGCAGCTCGTGGAGTCAGGCGGAGGACTGGTGCAGCCCGGGGGC |
| C1981- | | TCCCTGAGACTTTCCTGCGCGGCATCGGGTTTTACCTTCTCCTCCTAT |
| C3-nt | | GCTATGTCCTGGGTGCGCCAGGCCCCGGGAAAGGGACTGGAATGGGTG |
| ScFv | | TCCGCAATCAGCGGTAGCGGGGGCTCAACATACTACGCCGACTCCGTC |
| domain | | AAGGGTCGCTTCACTATTTCCCGGGACAACTCCAAGAATACCCTGTAC |
| | | CTCCAAATGAACAGCCTCAGGGCCGAGGATACTGCCGTGTACTACTGC |
| | | GCCAAAGTCGGATACGATAGCTCCGGTTACTACCGGGACTACTACGGA |
| | | ATGGACGTGTGGGGACAGGGCACCACCGTGACCGTGTCAAGCGGCGGA |
| | | GGCGGTTCAGGAGGGGGAGGCTCCGGCGGTGGAGGGTCCGAAATCGTC |
| | | CTGACTCAGTCGCCTGGCACTCTGTCGTTGTCCCCGGGGGAGCGCGCT |
| | | ACCCTGTCGTGTCGGGCGTCGCAGTCCGTGTCGAGCTCCTACCTCGCG |
| | | TGGTACCAGCAGAAGCCCGGACAGGCCCCTAGACTTCTGATCTACGGC |
| | | ACTTCTTCACGCGCCACCGGGATCAGCGACAGGTTCAGCGGCTCCGGC |
| | | TCCGGGACCGACTTCACCCTGACCATTAGCCGGCTGGAGCCTGAAGAT |
| | | TTCGCCGTGTATTACTGCCAACACTACGGAAACTCGCCGCCAAAGTTC |
| | | ACGTTCGGACCCGGAACCAAGCTGGAAATCAAG |
| BCMA_EBB- | 336 | QVQLVESGGGLVQPGGSLRLSCAASGFTFSSYAMSWVRQAPGKGLEWV |
| C1981- | | SAISGSGGSTYYADSVKGRFTISRDNSKNTLYLQMNSLRAEDTAVYYC |
| C3-aa | | AKVGYDSSGYYRDYYGMDVWGQGTTVTVSS |
| VH | | |
| BCMA_EBB- | 337 | EIVLTQSPGTLSLSPGERATLSCRASQSVSSSYLAWYQQKPGQAPRLL |
| C1981- | | IYGTSSRATGISDRFSGSGSGTDFTLTISRLEPEDFAVYYCQHYGNSP |
| C3-aa | | PKFTFGPGTKLEIK |
| VL | | |
| BCMA_EBB- | 338 | MALPVTALLLPLALLLHAARPQVQLVESGGGLVQPGGSLRLSCAASGF |
| C1981- | | TFSSYAMSWVRQAPGKGLEWVSAISGSGGSTYYADSVKGRFTISRDNS |
| C3-aa | | KNTLYLQMNSLRAEDTAVYYCAKVGYDSSGYYRDYYGMDVWGQGTTVT |
| Full CART | | VSSGGGGSGGGGSGGGGSEIVLTQSPGTLSLSPGERATLSCRASQSVS |
| | | SSYLAWYQQKPGQAPRLLIYGTSSRATGISDRFSGSGSGTDFTLTISR |
| | | LEPEDFAVYYCQHYGNSPPKFTFGPGTKLEIKTTTPAPRPPTPAPTIA |
| | | SQPLSLRPEACRPAAGGAVHTRGLDFACDIYIWAPLAGTCGVLLLSLV |
| | | ITLYCKRGRKKLLYIFKQPFMRPVQTTQEEDGCSCRFPEEEEGGCELR |
| | | VKFSRSADAPAYKQGQNQLYNELNLGRREEYDVLDKRRGRDPEMGGKP |
| | | RRKNPQEGLYNELQKDKMAEAYSEIGMKGERRRGKGHDGLYQGLSTAT |
| | | KDTYDALHMQALPPR |
| BCMA_EBB- | 339 | ATGGCCCTCCCTGTCACCGCCCTGCTGCTTCCGCTGGCTCTTCTGCTC |
| C1981- | | CACGCCGCTCGGCCCCAAGTGCAGCTCGTGGAGTCAGGCGGAGGACTG |
| C3-nt | | GTGCAGCCCGGGGGCTCCCTGAGACTTTCCTGCGCGGCATCGGGTTTT |
| Full CART | | ACCTTCTCCTCCTATGCTATGTCCTGGGTGCGCCAGGCCCCGGGAAAG |
| | | GGACTGGAATGGGTGTCCGCAATCAGCGGTAGCGGGGGCTCAACATAC |
| | | TACGCCGACTCCGTCAAGGGTCGCTTCACTATTTCCCGGGACAACTCC |
| | | AAGAATACCCTGTACCTCCAAATGAACAGCCTCAGGGCCGAGGATACT |
| | | GCCGTGTACTACTGCGCCAAAGTCGGATACGATAGCTCCGGTTACTAC |
| | | CGGGACTACTACGGAATGGACGTGTGGGGACAGGGCACCACCGTGACC |
| | | GTGTCAAGCGGCGGAGGCGGTTCAGGAGGGGGAGGCTCCGGCGGTGGA |
| | | GGGTCCGAAATCGTCCTGACTCAGTCGCCTGGCACTCTGTCGTTGTCC |
| | | CCGGGGGAGCGCGCTACCCTGTCGTGTCGGGCGTCGCAGTCCGTGTCG |
| | | AGCTCCTACCTCGCGTGGTACCAGCAGAAGCCCGGACAGGCCCCTAGA |
| | | CTTCTGATCTACGGCACTTCTTCACGCGCCACCGGGATCAGCGACAGG |
| | | TTCAGCGGCTCCGGCTCCGGGACCGACTTCACCCTGACCATTAGCCGG |
| | | CTGGAGCCTGAAGATTTCGCCGTGTATTACTGCCAACACTACGGAAAC |
| | | TCGCCGCCAAAGTTCACGTTCGGACCCGGAACCAAGCTGGAAATCAAG |
| | | ACCACTACCCCAGCACCGAGGCCACCCACCCCGGCTCCTACCATCGCC |
| | | TCCCAGCCTCTGTCCCTGCGTCCGGAGGCATGTAGACCCGCAGCTGGT |
| | | GGGGCCGTGCATACCCGGGGTCTTGACTTCGCCTGCGATATCTACATT |
| | | TGGGCCCCTCTGGCTGGTACTTGCGGGGTCCTGCTGCTTTCACTCGTG |
| | | ATCACTCTTTACTGTAAGCGCGGTCGGAAGAAGCTGCTGTACATCTTT |
| | | AAGCAACCCTTCATGAGGCCTGTGCAGACTACTCAAGAGGAGGACGGC |
| | | TGTTCATGCCGGTTCCCAGAGGAGGAGGAAGGCGGCTGCGAACTGCGC |
| | | GTGAAATTCAGCCGCAGCGCAGATGCTCCAGCCTACAAGCAGGGGCAG |
| | | AACCAGCTCTACAACGAACTCAATCTTGGTCGGAGAGAGGAGTACGAC |
| | | GTGCTGGACAAGCGGAGAGGACGGGACCCAGAAATGGGCGGGAAGCCG |
| | | CGCAGAAAGAATCCCCAAGAGGGCCTGTACAACGAGCTCCAAAAGGAT |
| | | AAGATGGCAGAAGCCTATAGCGAGATTGGTATGAAAGGGGAACGCAGA |
| | | AGAGGCAAAGGCCACGACGGACTGTACCAGGGACTCAGCACCGCCACC |
| | | AAGGACACCTATGACGCTCTTCACATGCAGGCCCTGCCGCCTCGG |

BCMA_EBB-C1978-G4

| | | |
|---|---|---|
| BCMA_EBB- | 340 | EVQLVESGGGLVQPGGSLRLSCAASGFTFSSYAMSWVRQAPGKGLEWV |
| C1978- | | SAISGSGGSTYYADSVKGRFTISRDNSKNTLYLQMNSLRAEDTAVYYC |
| G4-aa | | AKMGWSSGYLGAFDIWGQGTTVTVSSGGGGSGGGGSGGGGSEIVLTQS |
| ScFv | | PGTLSLSPGERATLSCRASQSVASSFLAWYQQKPGQAPRLLIYGASGR |
| domain | | ATGIPDRFSGSGSGTDFTLTISRLEPEDFAVYYCQHYGGSPRLTFGGG |
| | | TKVDIK |
| BCMA_EBB- | 341 | GAAGTCCAACTGGTGGAGTCCGGGGGAGGGCTCGTGCAGCCCGGAGGC |
| C1978- | | AGCCTTCGGCTGTCGTGCGCCGCCTCCGGGTTCACGTTCTCATCCTAC |
| G4-nt | | GCGATGTCGTGGGTCAGACAGGCACCAGGAAAGGGACTGGAATGGGTG |
| ScFv | | TCCGCCATTAGCGGCTCCGGCGGTAGCACCTACTATGCCGACTCAGTG |
| domain | | AAGGGAAGGTTCACTATCTCCCGCGACAACAGCAAGAACACCCTGTAC |
| | | CTCCAAATGAACTCTCTGCGGGCCGAGGATACCGCGGTGTACTATTGC |
| | | GCCAAGATGGGTTGGTCCAGCGGATACTTGGGAGCCTTCGACATTTGG |
| | | GGACAGGGCACTACTGTGACCGTGTCCTCCGGGGGTGGCGGATCGGGA |
| | | GGCGGCGGCTCGGGTGGAGGGGGTTCCGAAATCGTGTTGACCCAGTCA |
| | | CCGGGAACCCTCTCGCTGTCCCCGGGAGAACGGGCTACACTGTCATGT |
| | | AGAGCGTCCCAGTCCGTGGCTTCCTCGTTCCTGGCCTGGTACCAGCAG |
| | | AAGCCGGGACAGGCACCCCGCCTGCTCATCTACGGAGCCAGCGGCCGG |
| | | GCGACCGGCATCCCTGACCGCTTCTCCGGTTCCGGCTCGGGCACCGAC |
| | | TTTACTCTGACCATTAGCAGGCTTGAGCCCGAGGATTTTGCCGTGTAC |
| | | TACTGCCAACACTACGGGGGGAGCCCTCGCCTGACCTTCGGAGGCGGA |
| | | ACTAAGGTCGATATCAAAA |
| BCMA_EBB- | 342 | EVQLVESGGGLVQPGGSLRLSCAASGFTFSSYAMSWVRQAPGKGLEWV |
| C1978- | | SAISGSGGSTYYADSVKGRFTISRDNSKNTLYLQMNSLRAEDTAVYYC |
| G4-aa | | AKMGWSSGYLGAFDIWGQGTTVTVSS |
| VH | | |
| BCMA_EBB- | 343 | EIVLTQSPGTLSLSPGERATLSCRASQSVASSFLAWYQQKPGQAPRLL |
| C1978- | | IYGASGRATGIPDRFSGSGSGTDFTLTISRLEPEDFAVYYCQHYGGSP |
| G4-aa | | RLTFGGGTKVDIK |
| VL | | |
| BCMA_EBB- | 344 | MALPVTALLLPLALLLHAARPEVQLVESGGGLVQPGGSLRLSCAASGF |
| C1978- | | TFSSYAMSWVRQAPGKGLEWVSAISGSGGSTYYADSVKGRFTISRDNS |
| G4-aa | | KNTLYLQMNSLRAEDTAVYYCAKMGWSSGYLGAFDIWGQGTTVTVSSG |
| Full CART | | GGGSGGGGSGGGGSEIVLTQSPGTLSLSPGERATLSCRASQSVASSFL |
| | | AWYQQKPGQAPRLLIYGASGRATGIPDRFSGSGSGTDFTLTISRLEPE |
| | | DFAVYYCQHYGGSPRLTFGGGTKVDIKTTTPAPRPPTPAPTIASQPLS |
| | | LRPEACRPAAGGAVHTRGLDFACDIYIWAPLAGTCGVLLLSLVITLYC |
| | | KRGRKKLLYIFKQPFMRPVQTTQEEDGCSCRFPEEEEGGCELRVKFSR |
| | | SADAPAYKQGQNQLYNELNLGRREEYDVLDKRRGRDPEMGGKPRRKNP |
| | | QEGLYNELQKDKMAEAYSEIGMKGERRRGKGHDGLYQGLSTATKDTYD |
| | | ALHMQALPPR |
| BCMA_EBB- | 345 | ATGGCCCTCCCTGTCACCGCCCTGCTGCTTCCGCTGGCTCTTCTGCTC |
| C1978- | | CACGCCGCTCGGCCCGAAGTCCAACTGGTGGAGTCCGGGGGAGGGCTC |
| G4-nt | | GTGCAGCCCGGAGGCAGCCTTCGGCTGTCGTGCGCCGCCTCCGGGTTC |
| Full CART | | ACGTTCTCATCCTACGCGATGTCGTGGGTCAGACAGGCACCAGGAAAG |
| | | GGACTGGAATGGGTGTCCGCCATTAGCGGCTCCGGCGGTAGCACCTAC |
| | | TATGCCGACTCAGTGAAGGGAAGGTTCACTATCTCCCGCGACAACAGC |
| | | AAGAACACCCTGTACCTCCAAATGAACTCTCTGCGGGCCGAGGATACC |
| | | GCGGTGTACTATTGCGCCAAGATGGGTTGGTCCAGCGGATACTTGGGA |
| | | GCCTTCGACATTTGGGGACAGGGCACTACTGTGACCGTGTCCTCCGGG |
| | | GGTGGCGGATCGGGAGGCGGCGGCTCGGGTGGAGGGGGTTCCGAAATC |
| | | GTGTTGACCCAGTCACCGGGAACCCTCTCGCTGTCCCCGGGAGAACGG |
| | | GCTACACTGTCATGTAGAGCGTCCCAGTCCGTGGCTTCCTCGTTCCTG |
| | | GCCTGGTACCAGCAGAAGCCGGGACAGGCACCCCGCCTGCTCATCTAC |
| | | GGAGCCAGCGGCCGGGCGACCGGCATCCCTGACCGCTTCTCCGGTTCC |
| | | GGCTCGGGCACCGACTTTACTCTGACCATTAGCAGGCTTGAGCCCGAG |
| | | GATTTTGCCGTGTACTACTGCCAACACTACGGGGGGAGCCCTCGCCTG |
| | | ACCTTCGGAGGCGGAACTAAGGTCGATATCAAAACCACTACCCCAGCA |
| | | CCGAGGCCACCCACCCCGGCTCCTACCATCGCCTCCCAGCCTCTGTCC |
| | | CTGCGTCCGGAGGCATGTAGACCCGCAGCTGGTGGGGCCGTGCATACC |
| | | CGGGGTCTTGACTTCGCCTGCGATATCTACATTTGGGCCCCTCTGGCT |
| | | GGTACTTGCGGGGTCCTGCTGCTTTCACTCGTGATCACTCTTTACTGT |
| | | AAGCGCGGTCGGAAGAAGCTGCTGTACATCTTTAAGCAACCCTTCATG |
| | | AGGCCTGTGCAGACTACTCAAGAGGAGGACGGCTGTTCATGCCGGTTC |
| | | CCAGAGGAGGAGGAAGGCGGCTGCGAACTGCGCGTGAAATTCAGCCGC |
| | | AGCGCAGATGCTCCAGCCTACAAGCAGGGGCAGAACCAGCTCTACAAC |
| | | GAACTCAATCTTGGTCGGAGAGAGGAGTACGACGTGCTGGACAAGCGG |
| | | AGAGGACGGGACCCAGAAATGGGCGGGAAGCCGCGCAGAAAGAATCCC |
| | | CAAGAGGGCCTGTACAACGAGCTCCAAAAGGATAAGATGGCAGAAGCC |
| | | TATAGCGAGATTGGTATGAAAGGGGAACGCAGAAGAGGCAAAGGCCAC |
| | | GACGGACTGTACCAGGGACTCAGCACCGCCACCAAGGACACCTATGAC |
| | | GCTCTTCACATGCAGGCCCTGCCGCCTCGG |

TABLE 6
Additional exemplary BCMA CAR sequences

| | | SEQ |
|---|---|---|
| | | ID |
| Name | Sequence | NO: |
| A7D12.2 | QIQLVQSGPDLKKPGETVKLSCKASGYTFTNFGMNWVKQAPGKGFKWMAWINTYTGESYFA | 346 |
| VH | DDFKGRFAFSVETSATTAYLQINNLKTEDTATYFCARGEIYYGYDGGFAYWGQGTLVTVSA | |
| A7D12.2 | DVVMTQSHRFMSTSVGDRVSITCRASQDVNTAVSWYQQKPGQSPKLLIFSASYRYTGVPDR | 347 |
| VL | FTGSGSGADFTLTISSVQAEDLAVYYCQQHYSTPWTFGGGTKLDIK | |
| A7D12.2 | QIQLVQSGPDLKKPGETVKLSCKASGYTFTNFGMNWVKQAPGKGFKWMAWINTYTGESYFA | 348 |
| scFv | DDFKGRFAFSVETSATTAYLQINNLKTEDTATYFCARGEIYYGYDGGFAYWGQGTLVTVSA | |
| domain | GGGGSGGGGSGGGGSDVVMTQSHRFMSTSVGDRVSITCRASQDVNTAVSWYQQKPGQSPKL | |
| | LIFSASYRYTGVPDRFTGSGSGADFTLTISSVQAEDLAVYYCQQHYSTPWTFGGGTKLDIK | |
| A7D12.2 | QIQLVQSGPDLKKPGETVKLSCKASGYTFTNFGMNWVKQAPGKGFKWMAWINTYTGESYFA | 349 |
| Full | DDFKGRFAFSVETSATTAYLQINNLKTEDTATYFCARGEIYYGYDGGFAYWGQGTLVTVSA | |
| CART | GGGGSGGGGSGGGGSDVVMTQSHRFMSTSVGDRVSITCRASQDVNTAVSWYQQKPGQSPKL | |
| | LIFSASYRYTGVPDRFTGSGSGADFTLTISSVQAEDLAVYYCQQHYSTPWTFGGGTKLDIK | |
| | TTTPAPRPPTPAPTIASQPLSLRPEACRPAAGGAVHTRGLDFACDIYIWAPLAGTCGVLLL | |
| | SLVITLYCKRGRKKLLYIFKQPFMRPVQTTQEEDGCSCRFPEEEEGGCELRVKFSRSADAP | |
| | AYKQGQNQLYNELNLGRREEYDVLDKRRGRDPEMGGKPRRKNPQEGLYNELQKDKMAEAYS | |
| | EIGMKGERRRGKGHDGLYQGLSTATKDTYDALHMQALPPR | |
| C11D5.3 | QIQLVQSGPELKKPGETVKISCKASGYTFTDYSINWVKRAPGKGLKWMGWINTETREPAYA | 350 |
| VH | YDFRGRFAFSLETSASTAYLQINNLKYEDTATYFCALDYSYAMDYWGQGTSVTVSS | |
| C11D5.3 | DIVLTQSPASLAMSLGKRATISCRASESVSVIGAHLIHWYQQKPGQPPKLLIYLASNLETG | 351 |
| VL | VPARFSGSGSGTDFTLTIDPVEEDDVAIYSCLQSRIFPRTFGGGTKLEIK | |
| C11D5.3 | QIQLVQSGPELKKPGETVKISCKASGYTFTDYSINWVKRAPGKGLKWMGWINTETREPAYA | 352 |
| scFv | YDFRGRFAFSLETSASTAYLQINNLKYEDTATYFCALDYSYAMDYWGQGTSVTVSSGGGGS | |
| domain | GGGGSGGGGSQIQLVQSGPELKKPGETVKISCKASGYTFTDYSINWVKRAPGKGLKWMGWI | |
| | NTETREPAYAYDFRGRFAFSLETSASTAYLQINNLKYEDTATYFCALDYSYAMDYWGQGTS | |
| | VTVSS | |
| C11D5.3 | QIQLVQSGPELKKPGETVKISCKASGYTFTDYSINWVKRAPGKGLKWMGWINTETREPAYA | 353 |
| Full | YDFRGRFAFSLETSASTAYLQINNLKYEDTATYFCALDYSYAMDYWGQGTSVTVSSGGGGS | |
| CART | GGGGSGGGGSQIQLVQSGPELKKPGETVKISCKASGYTFTDYSINWVKRAPGKGLKWMGWI | |
| | NTETREPAYAYDFRGRFAFSLETSASTAYLQINNLKYEDTATYFCALDYSYAMDYWGQGTS | |
| | VTVSSTTTPAPRPPTPAPTIASQPLSLRPEACRPAAGGAVHTRGLDFACDIYIWAPLAGTC | |
| | GVLLLSLVITLYCKRGRKKLLYIFKQPFMRPVQTTQEEDGCSCRFPEEEEGGCELRVKFSR | |
| | SADAPAYKQGQNQLYNELNLGRREEYDVLDKRRGRDPEMGGKPRRKNPQEGLYNELQKDKM | |
| | AEAYSEIGMKGERRRGKGHDGLYQGLSTATKDTYDALHMQALPPR | |
| C12A3.2 | QIQLVQSGPELKKPGETVKISCKASGYTFRHYSMNWVKQAPGKGLKWMGRINTESGVPIYA | 354 |
| VH | DDFKGRFAFSVETSASTAYLVINNLKDEDTASYFCSNDYLYSLDFWGQGTALTVSS | |
| C12A3.2 | DIVLTQSPPSLAMSLGKRATISCRASESVTILGSHLIYWYQQKPGQPPTLLIQLASNVQTG | 355 |
| VL | VPARFSGSGSRTDFTLTIDPVEEDDVAVYYCLQSRTIPRTFGGGTKLEIK | |
| C12A3.2 | QIQLVQSGPELKKPGETVKISCKASGYTFRHYSMNWVKQAPGKGLKWMGRINTESGVPIYA | 356 |
| scFv | DDFKGRFAFSVETSASTAYLVINNLKDEDTASYFCSNDYLYSLDFWGQGTALTVSSGGGGS | |
| domain | GGGGSGGGGSDIVLTQSPPSLAMSLGKRATISCRASESVTILGSHLIYWYQQKPGQPPTLL | |
| | IQLASNVQTGVPARFSGSGSRTDFTLTIDPVEEDDVAVYYCLQSRTIPRTFGGGTKLEIK | |
| C12A3.2 | QIQLVQSGPELKKPGETVKISCKASGYTFRHYSMNWVKQAPGKGLKWMGRINTESGVPIYA | 357 |
| Full | DDFKGRFAFSVETSASTAYLVINNLKDEDTASYFCSNDYLYSLDFWGQGTALTVSSGGGGS | |
| CART | GGGGSGGGGSDIVLTQSPPSLAMSLGKRATISCRASESVTILGSHLIYWYQQKPGQPPTLL | |
| | IQLASNVQTGVPARFSGSGSRTDFTLTIDPVEEDDVAVYYCLQSRTIPRTFGGGTKLEIKT | |
| | TTPAPRPPTPAPTIASQPLSLRPEACRPAAGGAVHTRGLDFACDIYIWAPLAGTCGVLLLS | |
| | LVITLYCKRGRKKLLYIFKQPFMRPVQTTQEEDGCSCRFPEEEEGGCELRVKFSRSADAPA | |
| | YKQGQNQLYNELNLGRREEYDVLDKRRGRDPEMGGKPRRKNPQEGLYNELQKDKMAEAYSE | |
| | IGMKGERRRGKGHDGLYQGLSTATKDTYDALHMQALPPR | |
| C13F12.1 | QIQLVQSGPELKKPGETVKISCKASGYTFTHYSMNWVKQAPGKGLKWMGRINTETGEPLYA | 358 |
| VH | DDFKGRFAFSLETSASTAYLVINNLKNEDTATFFCSNDYLYSCDYWGQGTTLTVSS | |
| C13F12.1 | DIVLTQSPPSLAMSLGKRATISCRASESVTILGSHLIYWYQQKPGQPPTLLIQLASNVQTG | 359 |
| VL | VPARFSGSGSRTDFTLTIDPVEEDDVAVYYCLQSRTIPRTFGGGTKLEIK | |
| C13F12.1 | QIQLVQSGPELKKPGETVKISCKASGYTFTHYSMNWVKQAPGKGLKWMGRINTETGEPLYA | 360 |
| scFv | DDFKGRFAFSLETSASTAYLVINNLKNEDTATFFCSNDYLYSCDYWGQGTTLTVSSGGGGS | |
| domain | GGGGSGGGGSDIVLTQSPPSLAMSLGKRATISCRASESVTILGSHLIYWYQQKPGQPPTLL | |
| | IQLASNVQTGVPARFSGSGSRTDFTLTIDPVEEDDVAVYYCLQSRTIPRTFGGGTKLEIK | |
| C13F12.1 | QIQLVQSGPELKKPGETVKISCKASGYTFTHYSMNWVKQAPGKGLKWMGRINTETGEPLYA | 361 |
| Full | DDFKGRFAFSLETSASTAYLVINNLKNEDTATFFCSNDYLYSCDYWGQGTTLTVSSGGGGS | |
| CART | GGGGSGGGGSDIVLTQSPPSLAMSLGKRATISCRASESVTILGSHLIYWYQQKPGQPPTLL | |
| | IQLASNVQTGVPARFSGSGSRTDFTLTIDPVEEDDVAVYYCLQSRTIPRTFGGGTKLEIKT | |
| | TTPAPRPPTPAPTIASQPLSLRPEACRPAAGGAVHTRGLDFACDIYIWAPLAGTCGVLLLS | |
| | LVITLYCKRGRKKLLYIFKQPFMRPVQTTQEEDGCSCRFPEEEEGGCELRVKFSRSADAPA | |
| | YKQGQNQLYNELNLGRREEYDVLDKRRGRDPEMGGKPRRKNPQEGLYNELQKDKMAEAYSE | |
| | IGMKGERRRGKGHDGLYQGLSTATKDTYDALHMQALPPR | |

[0398] In certain embodiments, the full length BCMA CAR molecule includes the amino acid sequence of, or is encoded by the nucleotide sequence of, BCMA-1, BCMA-2, BCMA-3, BCMA-4, BCMA-5, BCMA-6, BCMA-7, BCMA-8, BCMA-9, BCMA-10, BCMA-11, BCMA-12, BCMA-13, BCMA-14, BCMA-15, 149362, 149363, 149364, 149365, 149366, 149367, 149368, 149369, BCMA EBB-C1978-A4, BCMA EBB-C1978-G1, BCMA_EBB-C1979-C1, BCMA EBB-C1978-C7, BCMA EBB-C1978-D10, BCMA EBB-C1979-C12, BCMA_EBB-C1980-G4, BCMA_EBB-C1980-D2, BCMA_EBB-C1978-A10, BCMA_EBB-C1978-D4, BCMA_EBB-C1980-A2, BCMA_EBB-C1981-C3, BCMA_EBB-C1978-G4, A7D12.2, C11D5.3, C12A3.2, or C13F12.1 provided in Table 5 or 6, or a sequence substantially (e.g., 85%, 95-99% or higher) identical thereto.

[0399] In certain embodiments, the BCMA CAR molecule, or the anti-BCMA antigen binding domain, includes the scFv amino acid sequence of BCMA-1, BCMA-2, BCMA-3, BCMA-4, BCMA-5, BCMA-6, BCMA-7, BCMA-8, BCMA-9, BCMA-10, BCMA-11, BCMA-12, BCMA-13, BCMA-14, BCMA-15, 149362, 149363, 149364, 149365, 149366, 149367, 149368, 149369, BCMA_EBB-C1978-A4, BCMA_EBB-C1978-G1, BCMA_EBB-C1979-C1, BCMA_EBB-C1978-C7, BCMA_EBB-C1978-D10, BCMA_EBB-C1979-C12, BCMA_EBB-C1980-G4, BCMA_EBB-C1980-D2, BCMA_EBB-C1978-A10, BCMA_EBB-C1978-D4, BCMA_EBB-C1980-A2, BCMA_EBB-C1981-C3, BCMA_EBB-C1978-G4, A7D12.2, C11D5.3, C12A3.2, or C13F12.1 provided in Table 5 or 6 (with or without the leader sequence), or a sequence substantially identical (e.g., 85%, 95-99% or higher identical, or up to 20, 15, 10, 8, 6, 5, 4, 3, 2, or 1 amino acid changes, e.g., substitutions (e.g., conservative substitutions)) to any of the aforesaid sequences.

[0400] In certain embodiments, the BCMA CAR molecule, or the anti-BCMA antigen binding domain, includes the heavy chain variable region and/or the light chain variable region of BCMA-1, BCMA-2, BCMA-3, BCMA-4, BCMA-5, BCMA-6, BCMA-7, BCMA-8, BCMA-9, BCMA-10, BCMA-11, BCMA-12, BCMA-13, BCMA-14, BCMA-15, 149362, 149363, 149364, 149365, 149366, 149367, 149368, 149369, BCMA_EBB-C1978-A4, BCMA_EBB-C1978-G1, BCMA_EBB-C1979-C1, BCMA_EBB-C1978-C7, BCMA_EBB-C1978-D10, BCMA_EBB-C1979-C12, BCMA_EBB-C1980-G4, BCMA_EBB-C1980-D2, BCMA_EBB-C1978-A10, BCMA_EBB-C1978-D4, BCMA_EBB-C1980-A2, BCMA_EBB-C1981-C3, BCMA_EBB-C1978-G4, A7D12.2, C11D5.3, C12A3.2, or C13F12.1 provided in Table 5 or 6, or a sequence substantially identical (e.g., 85%, 95-99% or higher identical, or up to 20, 15, 10, 8, 6, 5, 4, 3, 2, or 1 amino acid changes, e.g., substitutions (e.g., conservative substitutions)) to any of the aforesaid sequences.

[0401] In certain embodiments, the BCMA CAR molecule, or the anti-BCMA antigen binding domain, includes one, two or three CDRs from the heavy chain variable region (e.g., HCDR1, HCDR2 and/or HCDR3), provided in Table 7; and/or one, two or three CDRs from the light chain variable region (e.g., LCDR1, LCDR2 and/or LCDR3) of BCMA-1, BCMA-2, BCMA-3, BCMA-4, BCMA-5, BCMA-6, BCMA-7, BCMA-8, BCMA-9, BCMA-10, BCMA-11, BCMA-12, BCMA-13, BCMA-14, BCMA-15, 149362, 149363, 149364, 149365, 149366, 149367, 149368, 149369, BCMA_EBB-C1978-A4, BCMA_EBB-C1978-G1, BCMA_EBB-C1979-C1, BCMA_EBB-C1978-C7, BCMA_EBB-C1978-D10, BCMA_EBB-C1979-C12, BCMA_EBB-C1980-G4, BCMA_EBB-C1980-D2, BCMA_EBB-C1978-A10, BCMA_EBB-C1978-D4, BCMA_EBB-C1980-A2, BCMA_EBB-C1981-C3, BCMA_EBB-C1978-G4, A7D12.2, C11D5.3, C12A3.2, or C13F12.1, provided in Table 8; or a sequence substantially identical (e.g., 85%, 95-99% or higher identical, or up to 20, 15, 10, 8, 6, 5, 4, 3, 2, or 1 amino acid changes, e.g., substitutions (e.g., conservative substitutions)) to any of the aforesaid sequences.

[0402] In certain embodiments, the BCMA CAR molecule, or the anti-BCMA antigen binding domain, includes one, two or three CDRs from the heavy chain variable region (e.g., HCDR1, HCDR2 and/or HCDR3), provided in Table 9; and/or one, two or three CDRs from the light chain variable region (e.g., LCDR1, LCDR2 and/or LCDR3) of BCMA-1, BCMA-2, BCMA-3, BCMA-4, BCMA-5, BCMA-6, BCMA-7, BCMA-8, BCMA-9, BCMA-10, BCMA-11, BCMA-12, BCMA-13, BCMA-14, BCMA-15, 149362, 149363, 149364, 149365, 149366, 149367, 149368, 149369, BCMA_EBB-C1978-A4, BCMA_EBB-C1978-G1, BCMA_EBB-C1979-C1, BCMA_EBB-C1978-C7, BCMA_EBB-C1978-D10, BCMA_EBB-C1979-C12, BCMA_EBB-C1980-G4, BCMA_EBB-C1980-D2, BCMA_EBB-C1978-A10, BCMA_EBB-C1978-D4, BCMA_EBB-C1980-A2, BCMA_EBB-C1981-C3, BCMA_EBB-C1978-G4, A7D12.2, C11D5.3, C12A3.2, or C13F12.1, provided in Table 10; or a sequence substantially identical (e.g., 85%, 95-99% or higher identical, or up to 20, 15, 10, 8, 6, 5, 4, 3, 2, or 1 amino acid changes, e.g., substitutions (e.g., conservative substitutions)) to any of the aforesaid sequences.

[0403] In certain embodiments, the BCMA CAR molecule, or the anti-BCMA antigen binding domain, includes one, two or three CDRs from the heavy chain variable region (e.g., HCDR1, HCDR2 and/or HCDR3), provided in Table 11; and/or one, two or three CDRs from the light chain variable region (e.g., LCDR1, LCDR2 and/or LCDR3) of BCMA-1, BCMA-2, BCMA-3, BCMA-4, BCMA-5, BCMA-6, BCMA-7, BCMA-8, BCMA-9, BCMA-10, BCMA-11, BCMA-12, BCMA-13, BCMA-14, BCMA-15, 149362, 149363, 149364, 149365, 149366, 149367, 149368, 149369, BCMA_EBB-C1978-A4, BCMA_EBB-C1978-G1, BCMA_EBB-C1979-C1, BCMA_EBB-C1978-C7, BCMA_EBB-C1978-D10, BCMA_EBB-C1979-C12, BCMA_EBB-C1980-G4, BCMA_EBB-C1980-D2, BCMA_EBB-C1978-A10, BCMA_EBB-C1978-D4, BCMA_EBB-C1980-A2, BCMA_EBB-C1981-C3, BCMA_EBB-C1978-G4, A7D12.2, C11D5.3, C12A3.2, or C13F12.1, provided in Table 12; or a sequence substantially identical (e.g., 85%, 95-99% or higher identical, or up to 20, 15, 10, 8, 6, 5, 4, 3, 2, or 1 amino acid changes, e.g., substitutions (e.g., conservative substitutions)) to any of the aforesaid sequences.

[0404] The sequences of human CDR sequences of the scFv domains are shown in Tables 7, 9, and 11 for the heavy chain variable domains and in Tables 8, 10, and 12 for the light chain variable domains. “ID” stands for the respective SEQ ID NO for each CDR.

TABLE 7
Heavy Chain Variable Domain CDRs according to the Kabat
numbering scheme (Kabat et al. (1991), “Sequences of
Proteins of Immunological Interest,” 5th Ed. Public
Health Service, National Institutes of
Health, Bethesda, MD)

| Candidate | HCDR1 | ID | HCDR2 | ID | HCDR3 | ID |
|---|---|---|---|---|---|---|
| 139109 | NHGMS | 395 | GIVYSGSTYYAASVKG | 396 | HGGESDV | 397 |
| 139103 | NYAMS | 398 | GISRSGENTYYADSV | 399 | SPAHYYGGMDV | 400 |
| | | | KG | | | |
| 139105 | DYAMH | 401 | GISWNSGSIGYADSV | 402 | HSFLAY | 403 |
| | | | KG | | | |
| 139111 | NHGMS | 404 | GIVYSGSTYYAASVKG | 405 | HGGESDV | 406 |
| 139100 | NFGIN | 407 | WINPKNNNTNYAQK | 408 | GPYYYQSYMDV | 409 |
| | | | FQG | | | |
| 139101 | SDAMT | 410 | VISGSGGTTYYADSV | 411 | LDSSGYYYARGPRY | 412 |
| | | | KG | | | |
| 139102 | NYGIT | 413 | WISAYNGNTNYAQK | 414 | GPYYYYMDV | 415 |
| | | | FQG | | | |
| 139104 | NHGMS | 416 | GIVYSGSTYYAASVKG | 417 | HGGESDV | 418 |
| 139106 | NHGMS | 419 | GIVYSGSTYYAASVKG | 420 | HGGESDV | 421 |
| 139107 | NHGMS | 422 | GIVYSGSTYYAASVKG | 423 | HGGESDV | 424 |
| 139108 | DYYMS | 425 | YISSSGSTIYYADSVKG | 426 | ESGDGMDV | 427 |
| 139110 | DYYMS | 428 | YISSSGNTIYYADSVKG | 429 | STMVREDY | 430 |
| 139112 | NHGMS | 431 | GIVYSGSTYYAASVKG | 432 | HGGESDV | 433 |
| 139113 | NHGMS | 434 | GIVYSGSTYYAASVKG | 435 | HGGESDV | 436 |
| 139114 | NHGMS | 437 | GIVYSGSTYYAASVKG | 438 | HGGESDV | 439 |
| 149362 | SSYYYWG | 440 | SIYYSGSAYYNPSLKS | 441 | HWQEWPDAFDI | 442 |
| 149363 | TSGMCVS | 443 | RIDWDEDKFYSTSLKT | 444 | SGAGGTSATAFDI | 445 |
| 149364 | SYSMN | 446 | SISSSSSYIYYADSVKG | 447 | TIAAVYAFDI | 448 |
| 149365 | DYYMS | 449 | YISSSGSTIYYADSVKG | 450 | DLRGAFDI | 451 |
| 149366 | SHYIH | 452 | MINPSGGVTAYSQTL | 453 | EGSGSGWYFDF | 454 |
| | | | QG | | | |
| 149367 | SGGYYWS | 455 | YIYYSGSTYYNPSLKS | 456 | AGIAARLRGAFDI | 457 |
| 149368 | SYAIS | 458 | GIIPIFGTANYAQKFQG | 459 | RGGYQLLRWDVG | 460 |
| | | | | | LLRSAFDI | |
| 149369 | SNSAAWN | 461 | RTYYRSKWYSFYAIS | 462 | SSPEGLFLYWFDP | 463 |
| | | | LKS | | | |
| BCMA_EBB- | SYAMS | 464 | AISGSGGSTYYADSV | 465 | VEGSGSLDY | 466 |
| C1978-A4 | | | KG | | | |
| BCMA_EBB- | RYPMS | 467 | GISDSGVSTYYADSA | 468 | RAGSEASDI | 469 |
| C1978-G1 | | | KG | | | |
| BCMA_EBB- | SYAMS | 470 | AISGSGGSTYYADSV | 471 | ATYKRELRYYYG | 472 |
| C1979-C1 | | | KG | | MDV | |
| BCMA_EBB- | SYAMS | 473 | AISGSGGSTYYADSV | 474 | ATYKRELRYYYG | 475 |
| C1978-C7 | | | KG | | MDV | |
| BCMA_EBB- | DYAMH | 476 | GISWNSGSIGYADSV | 477 | VGKAVPDV | 478 |
| C1978-D10 | | | KG | | | |
| BCMA_EBB- | DYAMH | 479 | SINWKGNSLAYGDSV | 480 | HQGVAYYNYAM | 481 |
| C1979-C12 | | | KG | | DV | |
| BCMA_EBB- | SYAMS | 482 | AISGSGGSTYYADSV | 483 | VVRDGMDV | 484 |
| C1980-G4 | | | KG | | | |
| BCMA_EBB- | SYAMS | 485 | AISGSGGSTYYADSV | 486 | IPQTGTFDY | 487 |
| C1980-D2 | | | KG | | | |
| BCMA_EBB- | SYAMS | 488 | AISGSGGSTYYADSV | 489 | ANYKRELRYYYG | 490 |
| C1978-A10 | | | KG | | MDV | |
| BCMA_EBB- | SYAMS | 491 | AISGSGGSTYYADSV | 492 | ALVGATGAFDI | 493 |
| C1978-D4 | | | KG | | | |
| BCMA_EBB- | SYAMS | 494 | AISGSGGSTYYADSV | 495 | WFGEGFDP | 496 |
| C1980-A2 | | | KG | | | |
| BCMA_EBB- | SYAMS | 497 | AISGSGGSTYYADSV | 498 | VGYDSSGYYRDY | 499 |
| C1981-C3 | | | KG | | YGMDV | |
| BCMA_EBB- | SYAMS | 500 | AISGSGGSTYYADSV | 501 | MGWSSGYLGAFDI | 502 |
| C1978-G4 | | | KG | | | |
| A7D12.2 | NFGMN | 503 | WINTYTGESYFADDF | 504 | GEIYYGYDGGFAY | 505 |
| | | | KG | | | |
| C11D5.3 | DYSIN | 506 | WINTETREPAYAYDF | 507 | DYSYAMDY | 508 |
| | | | RG | | | |
| C12A3.2 | HYSMN | 509 | RINTESGVPIYADDFKG | 510 | DYLYSLDF | 511 |
| C13F12.1 | HYSMN | 512 | RINTETGEPLYADDF | 513 | DYLYSCDY | 514 |
| | | | KG | | | |

TABLE 8
Light Chain Variable Domain CDRs according to the Kabat
numbering scheme (Kabat et al. (1991), “Sequences
of Proteins of Immunological Interest,” 5th Ed. Public
Health Service, National Institutes of
Health, Bethesda, MD)

| Candidate | LCDR1 | ID | LCDR2 | ID | LCDR3 | ID |
|---|---|---|---|---|---|---|
| 139109 | RASQSISSYLN | 515 | AASSLQS | 516 | QQSYSTPYT | 517 |
| 139103 | RASQSISSSFLA | 518 | GASRRAT | 519 | QQYHSSPSWT | 520 |
| 139105 | RSSQSLLHSNGYNYLD | 521 | LGSNRAS | 522 | MQALQTPYT | 523 |
| 139111 | KSSQSLLRNDGKTPLY | 524 | EVSNRFS | 525 | MQNIQFPS | 526 |
| 139100 | RSSQSLLHSNGYNYLN | 527 | LGSKRAS | 528 | MQALQTPYT | 529 |
| 139101 | RASQSISSYLN | 530 | GASTLAS | 531 | QQSYKRAS | 532 |
| 139102 | RSSQSLLYSNGYNYVD | 533 | LGSNRAS | 534 | MQGRQFPYS | 535 |
| 139104 | RASQSVSSNLA | 536 | GASTRAS | 537 | QQYGSSLT | 538 |
| 139106 | RASQSVSSKLA | 539 | GASIRAT | 540 | QQYGSSSWT | 541 |
| 139107 | RASQSVGSTNLA | 542 | DASNRAT | 543 | QQYGSSPPWT | 544 |
| 139108 | RASQSISSYLN | 545 | AASSLQS | 546 | QQSYTLA | 547 |
| 139110 | KSSESLVHNSGKTYLN | 548 | EVSNRDS | 549 | MQGTHWPGT | 550 |
| 139112 | QASEDINKFLN | 551 | DASTLQT | 552 | QQYESLPLT | 553 |
| 139113 | RASQSVGSNLA | 554 | GASTRAT | 555 | QQYNDWLPVT | 556 |
| 139114 | RASQSIGSSSLA | 557 | GASSRAS | 558 | QQYAGSPPFT | 559 |
| 149362 | KASQDIDDAMN | 560 | SATSPVP | 561 | LQHDNFPLT | 562 |
| 149363 | RASQDIYNNLA | 563 | AANKSQS | 564 | QHYYRFPYS | 565 |
| 149364 | RSSQSLLHSNGYNYLD | 566 | LGSNRAS | 567 | MQALQTPYT | 568 |
| 149365 | GGNNIGTKSVH | 569 | DDSVRPS | 570 | QVWDSDSEHVV | 571 |
| 149366 | SGDGLSKKYVS | 572 | RDKERPS | 573 | QAWDDTTVV | 574 |
| 149367 | RASQGIRNWLA | 575 | AASNLQS | 576 | QKYNSAPFT | 577 |
| 149368 | GGNNIGSKSVH | 578 | GKNNRPS | 579 | SSRDSSGDHLRV | 580 |
| 149369 | QGDSLGNYYAT | 581 | GTNNRPS | 582 | NSRDSSGHHLL | 583 |
| BCMA_EBB- | RASQSVSSAYLA | 584 | GASTRAT | 585 | QHYGSSFNGSS | 586 |
| C1978- | | | | | LFT | |
| A4 | | | | | | |
| BCMA_EBB- | RASQSVSNSLA | 587 | DASSRAT | 588 | QQFGTSSGLT | 589 |
| C1978- | | | | | | |
| G1 | | | | | | |
| BCMA_EBB- | RASQSVSSSFLA | 590 | GASSRAT | 591 | QQYHSSPSWT | 592 |
| C1979- | | | | | | |
| C1 | | | | | | |
| BCMA_EBB- | RASQSVSTTFLA | 593 | GSSNRAT | 594 | QQYHSSPSWT | 595 |
| C1978- | | | | | | |
| C7 | | | | | | |
| BCMA_EBB- | RASQSISSYLN | 596 | AASSLQS | 597 | QQSYSTPYS | 598 |
| C1978- | | | | | | |
| D10 | | | | | | |
| BCMA_EBB- | RATQSIGSSFLA | 599 | GASQRAT | 1205 | QHYESSPSWT | 1206 |
| C1979- | | | | | | |
| C12 | | | | | | |
| BCMA_EBB- | RASQSVSSSYLA | 1207 | GASSRAT | 1208 | QQYGSPPRFT | 600 |
| C1980- | | | | | | |
| G4 | | | | | | |
| BCMA_EBB- | RASQSVSSSYLA | 601 | GASSRAT | 602 | QHYGSSPSWT | 603 |
| C1980- | | | | | | |
| D2 | | | | | | |
| BCMA_EBB- | RASQRVASNYLA | 604 | GASSRAT | 605 | QHYDSSPSWT | 606 |
| C1978- | | | | | | |
| A10 | | | | | | |
| BCMA_EBB- | RASQSLSSNFLA | 607 | GASNWAT | 608 | QYYGTSPMYT | 609 |
| C1978- | | | | | | |
| D4 | | | | | | |
| BCMA_EBB- | RSSQSLLHSNGYNYLD | 610 | LGSNRAS | 611 | MQALQTPLT | 612 |
| C1980- | | | | | | |
| A2 | | | | | | |
| BCMA_EBB- | RASQSVSSSYLA | 613 | GTSSRAT | 614 | QHYGNSPPKFT | 615 |
| C1981- | | | | | | |
| C3 | | | | | | |
| BCMA_EBB- | RASQSVASSFLA | 616 | GASGRAT | 617 | QHYGGSPRLT | 618 |
| C1978- | | | | | | |
| G4 | | | | | | |
| A7D12.2 | RASQDVNTAVS | 619 | SASYRYT | 620 | QQHYSTPWT | 621 |
| C11D5.3 | RASESVSVIGAHLIH | 622 | LASNLET | 623 | LQSRIFPRT | 624 |
| C12A3.2 | RASESVTILGSHLIY | 625 | LASNVQT | 626 | LQSRTIPRT | 627 |
| C13F12.1 | RASESVTILGSHLIY | 628 | LASNVQT | 629 | LQSRTIPRT | 630 |

TABLE 9
Heavy Chain Variable Domain CDRs according to
the Chothia numbering scheme (Al- Lazikani
et al., (1997) JMB 273, 927-948)

| Candidate | HCDR1 | ID | HCDR2 | ID | HCDR3 | ID |
|---|---|---|---|---|---|---|
| 139109 | GFALSNH | 631 | VYSGS | 632 | HGGESDV | 633 |
| 139103 | GFTFSNY | 634 | SRSGEN | 635 | SPAHYYGGMDV | 636 |
| 139105 | GFTFDDY | 637 | SWNSGS | 638 | HSFLAY | 639 |
| 139111 | GFALSNH | 640 | VYSGS | 641 | HGGESDV | 642 |
| 139100 | GYIFDNF | 643 | NPKNNN | 644 | GPYYYQSYMDV | 645 |
| 139101 | GFTFSSD | 646 | SGSGGT | 647 | LDSSGYYYARGP | 648 |
| | | | | | RY | |
| 139102 | GYTFSNY | 649 | SAYNGN | 650 | GPYYYYMDV | 651 |
| 139104 | GFALSNH | 652 | VYSGS | 653 | HGGESDV | 654 |
| 139106 | GFALSNH | 655 | VYSGS | 656 | HGGESDV | 657 |
| 139107 | GFALSNH | 658 | VYSGS | 659 | HGGESDV | 660 |
| 139108 | GFTFSDY | 661 | SSSGST | 662 | ESGDGMDV | 663 |
| 139110 | GFTFSDY | 664 | SSSGNT | 665 | STMVREDY | 666 |
| 139112 | GFALSNH | 667 | VYSGS | 668 | HGGESDV | 669 |
| 139113 | GFALSNH | 670 | VYSGS | 671 | HGGESDV | 672 |
| 139114 | GFALSNH | 673 | VYSGS | 674 | HGGESDV | 675 |
| 149362 | GGSISSSYY | 676 | YYSGS | 677 | HWQEWPDAFDI | 678 |
| 149363 | GFSLRTSGM | 679 | DWDED | 680 | SGAGGTSATAFDI | 681 |
| 149364 | GFTFSSY | 682 | SSSSSY | 683 | TIAAVYAFDI | 684 |
| 149365 | GFTFSDY | 685 | SSSGST | 686 | DLRGAFDI | 687 |
| 149366 | GYTVTSH | 688 | NPSGGV | 689 | EGSGSGWYFDF | 690 |
| 149367 | GGSISSGGY | 691 | YYSGS | 692 | AGIAARLRGAFDI | 693 |
| 149368 | GGTFSSY | 694 | IPIFGT | 695 | RGGYQLLRWDV | 696 |
| | | | | | GLLRSAFDI | |
| 149369 | GDSVSSNSA | 697 | YYRSKWY | 698 | SSPEGLFLYWFDP | 699 |
| BCMA_EBB- | GFTFSSY | 700 | SGSGGS | 701 | VEGSGSLDY | 702 |
| C1978-A4 | | | | | | |
| BCMA_EBB- | GITFSRY | 703 | SDSGVS | 704 | RAGSEASDI | 705 |
| C1978-G1 | | | | | | |
| BCMA_EBB- | GFTFSSY | 706 | SGSGGS | 707 | ATYKRELRYYYG | 708 |
| C1979-C1 | | | | | MDV | |
| BCMA_EBB- | GFTFSSY | 709 | SGSGGS | 710 | ATYKRELRYYYG | 711 |
| C1978-C7 | | | | | MDV | |
| BCMA_EBB- | GFTFDDY | 712 | SWNSGS | 713 | VGKAVPDV | 714 |
| C1978-D10 | | | | | | |
| BCMA_EBB- | GFTFDDY | 715 | NWKGNS | 716 | HQGVAYYNYAMDV | 717 |
| C1979-C12 | | | | | | |
| BCMA_EBB- | GFTFSSY | 718 | SGSGGS | 719 | VVRDGMDV | 720 |
| C1980-G4 | | | | | | |
| BCMA_EBB- | GFTFSSY | 721 | SGSGGS | 722 | IPQTGTFDY | 723 |
| C1980-D2 | | | | | | |
| BCMA_EBB- | GFTFSSY | 724 | SGSGGS | 725 | ANYKRELRYYY | 726 |
| C1978-A10 | | | | | GMDV | |
| BCMA_EBB- | GFSFSSY | 727 | SGSGGS | 728 | ALVGATGAFDI | 729 |
| C1978-D4 | | | | | | |
| BCMA_EBB- | GFTFSSY | 730 | SGSGGS | 731 | WFGEGFDP | 732 |
| C1980-A2 | | | | | | |
| BCMA_EBB- | GFTFSSY | 733 | SGSGGS | 734 | VGYDSSGYYRDYY | 735 |
| C1981-C3 | | | | | GMDV | |
| BCMA_EBB- | GFTFSSY | 736 | SGSGGS | 738 | MGWSSGYLGAFDI | 739 |
| C1978-G4 | | | | | | |
| A7D12.2 | GYTFTNF | 740 | NTYTGE | 741 | GEIYYGYDGGFAY | 742 |
| C11D5.3 | GYTFTDY | 743 | NTETRE | 744 | DYSYAMDY | 745 |
| C12A3.2 | GYTFRHY | 746 | NTESGV | 747 | DYLYSLDF | 748 |
| C13F12.1 | GYTFTHY | 749 | NTETGE | 750 | DYLYSCDY | 751 |

TABLE 10
Light Chain Variable Domain CDRs according
to the Chothia numbering scheme (Al-Lazikani
et al., (1997) JMB 273, 927-948)

| Candidate | LCDR1 | ID | LCDR2 | ID | LCDR3 | ID |
|---|---|---|---|---|---|---|
| 139109 | SQSISSY | 752 | AAS | 753 | SYSTPY | 754 |
| 139103 | SQSISSSF | 755 | GAS | 756 | YHSSPSW | 757 |
| 139105 | SQSLLHSNGYNY | 758 | LGS | 759 | ALQTPY | 760 |
| 139111 | SQSLLRNDGKTP | 761 | EVS | 762 | NIQFP | 763 |
| 139100 | SQSLLHSNGYNY | 764 | LGS | 765 | ALQTPY | 766 |
| 139101 | SQSISSY | 767 | GAS | 768 | SYKRA | 769 |
| 139102 | SQSLLYSNGYNY | 770 | LGS | 771 | GRQFPY | 772 |
| 139104 | SQSVSSN | 773 | GAS | 774 | YGSSL | 775 |
| 139106 | SQSVSSK | 776 | GAS | 777 | YGSSSW | 778 |
| 139107 | SQSVGSTN | 779 | DAS | 780 | YGSSPPW | 781 |
| 139108 | SQSISSY | 782 | AAS | 783 | SYTL | 784 |
| 139110 | SESLVHNSGKTY | 785 | EVS | 786 | GTHWPG | 787 |
| 139112 | SEDINKF | 1209 | DAS | 1210 | YESLPL | 1211 |
| 139113 | SQSVGSN | 1212 | GAS | 1213 | YNDWLPV | 1214 |
| 139114 | SQSIGSSS | 1215 | GAS | 1216 | YAGSPPF | 788 |
| 149362 | SQDIDDA | 789 | SAT | 790 | HDNFPL | 791 |
| 149363 | SQDIYNN | 792 | AAN | 793 | YYRFPY | 794 |
| 149364 | SQSLLHSNGYNY | 795 | LGS | 796 | ALQTPY | 797 |
| 149365 | NNIGTKS | 798 | DDS | 799 | WDSDSEHV | 800 |
| 149366 | DGLSKKY | 801 | RDK | 802 | WDDTTV | 803 |
| 149367 | SQGIRNW | 804 | AAS | 805 | YNSAPF | 806 |
| 149368 | NNIGSKS | 807 | GKN | 808 | RDSSGDHLR | 809 |
| 149369 | DSLGNYY | 810 | GTN | 811 | RDSSGHHL | 812 |
| BCMA_EBB- | SQSVSSAY | 813 | GAS | 814 | YGSSFNGSSLF | 815 |
| C1978-A4 | | | | | | |
| BCMA_EBB- | SQSVSNS | 816 | DAS | 817 | FGTSSGL | 818 |
| C1978-G1 | | | | | | |
| BCMA_EBB- | SQSVSSSF | 819 | GAS | 820 | YHSSPSW | 821 |
| C1979-C1 | | | | | | |
| BCMA_EBB- | SQSVSTTF | 822 | GSS | 823 | YHSSPSW | 824 |
| C1978-C7 | | | | | | |
| BCMA_EBB- | SQSISSY | 825 | AAS | 826 | SYSTPY | 827 |
| C1978-D10 | | | | | | |
| BCMA_EBB- | TQSIGSSF | 828 | GAS | 829 | YESSPSW | 830 |
| C1979-C12 | | | | | | |
| BCMA_EBB- | SQSVSSSY | 831 | GAS | 832 | YGSPPRF | 833 |
| C1980-G4 | | | | | | |
| BCMA_EBB- | SQSVSSSY | 834 | GAS | 835 | YGSSPSW | 836 |
| C1980-D2 | | | | | | |
| BCMA_EBB- | SQRVASNY | 837 | GAS | 838 | YDSSPSW | 839 |
| C1978-A10 | | | | | | |
| BCMA_EBB- | SQSLSSNF | 840 | GAS | 841 | YGTSPMY | 842 |
| C1978-D4 | | | | | | |
| BCMA_EBB- | SQSLLHSNGYNY | 843 | LGS | 844 | ALQTPL | 845 |
| C1980-A2 | | | | | | |
| BCMA_EBB- | SQSVSSSY | 846 | GTS | 847 | YGNSPPKF | 848 |
| C1981-C3 | | | | | | |
| BCMA_EBB- | SQSVASSF | 849 | GAS | 850 | YGGSPRL | 851 |
| C1978-G4 | | | | | | |
| A7D12.2 | SQDVNTA | 852 | SAS | 853 | HYSTPW | 854 |
| C11D5.3 | SESVSVIGAHL | 855 | LAS | 856 | SRIFPR | 857 |
| C12A3.2 | SESVTILGSHL | 858 | LAS | 859 | SRTIPR | 860 |
| C13F12.1 | SESVTILGSHL | 861 | LAS | 862 | SRTIPR | 963 |

TABLE 11
Heavy Chain Variable Domain CDRs according to a
combination of the Kabat numbering scheme (Kabat
et al. (1991), “Sequences of Proteins of Immunological
Interest,” 5th Ed. Public Health Service, National
Institutes of Health, Bethesda, MD) and the Chothia
numbering scheme (Al-Lazikani et al., (1997)
JMB 273, 927-948).

| Candidate | HCDR1 | ID | HCDR2 | ID | HCDR3 | ID |
|---|---|---|---|---|---|---|
| 139109 | GFALSNHGMS | 964 | GIVYSGSTYYAAS | 965 | HGGESDV | 966 |
| | | | VKG | | | |
| 139103 | GFTFSNYAMS | 967 | GISRSGENTYYAD | 968 | SPAHYYGGMDV | 969 |
| | | | SVKG | | | |
| 139105 | GFTFDDYAMH | 970 | GISWNSGSIGYAD | 971 | HSFLAY | 972 |
| | | | SVKG | | | |
| 139111 | GFALSNHGMS | 973 | GIVYSGSTYYAAS | 974 | HGGESDV | 975 |
| | | | VKG | | | |
| 139100 | GYIFDNFGIN | 976 | WINPKNNNTNYA | 978 | GPYYYQSYMDV | 979 |
| | | | QKFQG | | | |
| 139101 | GFTFSSDAMT | 980 | VISGSGGTTYYAD | 981 | LDSSGYYYAR | 982 |
| | | | SVKG | | GPRY | |
| 139102 | GYTFSNYGIT | 983 | WISAYNGNTNYA | 984 | GPYYYYMDV | 985 |
| | | | QKFQG | | | |
| 139104 | GFALSNHGMS | 986 | GIVYSGSTYYAAS | 987 | HGGESDV | 988 |
| | | | VKG | | | |
| 139106 | GFALSNHGMS | 989 | GIVYSGSTYYAAS | 990 | HGGESDV | 991 |
| | | | VKG | | | |
| 139107 | GFALSNHGMS | 992 | GIVYSGSTYYAAS | 993 | HGGESDV | 994 |
| | | | VKG | | | |
| 139108 | GFTFSDYYMS | 995 | YISSSGSTIYYADS | 996 | ESGDGMDV | 997 |
| | | | VKG | | | |
| 139110 | GFTFSDYYMS | 998 | YISSSGNTIYYAD | 999 | STMVREDY | 1000 |
| | | | SVKG | | | |
| 139112 | GFALSNHGMS | 1001 | GIVYSGSTYYAAS | 1002 | HGGESDV | 1003 |
| | | | VKG | | | |
| 139113 | GFALSNHGMS | 1004 | GIVYSGSTYYAAS | 1005 | HGGESDV | 1006 |
| | | | VKG | | | |
| 139114 | GFALSNHGMS | 1007 | GIVYSGSTYYAAS | 1008 | HGGESDV | 1009 |
| | | | VKG | | | |
| 149362 | GGSISSSYYYWG | 1010 | SIYYSGSAYYNPS | 1011 | HWQEWPDAFDI | 1012 |
| | | | LKS | | | |
| 149363 | GFSLRTSGMC | 1013 | RIDWDEDKFYSTS | 1014 | SGAGGTSATAF | 1015 |
| | VS | | LKT | | DI | |
| 149364 | GFTFSSYSMN | 1016 | SISSSSSYIYYADS | 1017 | TIAAVYAFDI | 1018 |
| | | | VKG | | | |
| 149365 | GFTFSDYYMS | 1019 | YISSSGSTIYYADS | 1020 | DLRGAFDI | 1021 |
| | | | VKG | | | |
| 149366 | GYTVTSHYIH | 1022 | MINPSGGVTAYS | 1023 | EGSGSGWYFDF | 1024 |
| | | | QTLQG | | | |
| 149367 | GGSISSGGYY | 1025 | YIYYSGSTYYNPS | 1026 | AGIAARLRGAF | 1027 |
| | WS | | LKS | | DI | |
| 149368 | GGTFSSYAIS | 1028 | GIIPIFGTANYAQ | 1029 | RGGYQLLRWD | 1030 |
| | | | KFQG | | VGLLRSAFDI | |
| 149369 | GDSVSSNSAA | 1031 | RTYYRSKWYSFY | 1032 | SSPEGLFLYWF | 1033 |
| | WN | | AISLKS | | DP | |
| BCMA_EBB- | GFTFSSYAMS | 1034 | AISGSGGSTYYAD | 1035 | VEGSGSLDY | 1036 |
| C1978-A4 | | | SVKG | | | |
| BCMA_EBB- | GITFSRYPMS | 1037 | GISDSGVSTYYAD | 1038 | RAGSEASDI | 1039 |
| C1978-G1 | | | SAKG | | | |
| BCMA_EBB- | GFTFSSYAMS | 1040 | AISGSGGSTYYAD | 1041 | ATYKRELRYY | 1042 |
| C1979-C1 | | | SVKG | | YGMDV | |
| BCMA_EBB- | GFTFSSYAMS | 1043 | AISGSGGSTYYAD | 1044 | ATYKRELRYY | 1045 |
| C1978-C7 | | | SVKG | | YGMDV | |
| BCMA_EBB- | GFTFDDYAMH | 1046 | GISWNSGSIGYAD | 1047 | VGKAVPDV | 1048 |
| C1978-D10 | | | SVKG | | | |
| BCMA_EBB- | GFTFDDYAMH | 1049 | SINWKGNSLAYG | 1050 | HQGVAYYNYA | 1051 |
| C1979-C12 | | | DSVKG | | MDV | |
| BCMA_EBB- | GFTFSSYAMS | 1052 | AISGSGGSTYYAD | 1053 | VVRDGMDV | 1054 |
| C1980-G4 | | | SVKG | | | |
| BCMA_EBB- | GFTFSSYAMS | 1055 | AISGSGGSTYYAD | 1056 | IPQTGTFDY | 1057 |
| C1980-D2 | | | SVKG | | | |
| BCMA_EBB- | GFTFSSYAMS | 1058 | AISGSGGSTYYAD | 1059 | ANYKRELRYY | 1060 |
| C1978-A10 | | | SVKG | | YGMDV | |
| BCMA_EBB- | GFSFSSYAMS | 1061 | AISGSGGSTYYAD | 1062 | ALVGATGAFDI | 1063 |
| C1978-D4 | | | SVKG | | | |
| BCMA_EBB- | GFTFSSYAMS | 1064 | AISGSGGSTYYAD | 1065 | WFGEGFDP | 1066 |
| C1980-A2 | | | SVKG | | | |
| BCMA_EBB- | GFTFSSYAMS | 1067 | AISGSGGSTYYAD | 1068 | VGYDSSGYYR | 1069 |
| C1981-C3 | | | SVKG | | DYYGMDV | |
| BCMA_EBB- | GFTFSSYAMS | 1070 | AISGSGGSTYYAD | 1071 | MGWSSGYLGA | 1072 |
| C1978-G4 | | | SVKG | | FDI | |
| A7D12.2 | GYTFTNFGMN | 1073 | WINTYTGESYFA | 1074 | GEIYYGYDGGF | 1075 |
| | | | DDFKG | | AY | |
| C11D5.3 | GYTFTDYSIN | 1076 | WINTETREPAYA | 1078 | DYSYAMDY | 1079 |
| | | | YDFRG | | | |
| C12A3.2 | GYTFRHYSMN | 1080 | RINTESGVPIYAD | 1081 | DYLYSLDF | 1082 |
| | | | DFKG | | | |
| C13F12.1 | GYTFTHYSMN | 1083 | RINTETGEPLYAD | 1084 | DYLYSCDY | 1085 |
| | | | DFKG | | | |

TABLE 12
Light Chain Variable Domain CDRs according to a
combination of the Kabat numbering scheme (Kabat
et al. (1991), “Sequences of Proteins of Immunological
Interest,” 5th Ed. Public Health Service, National
Institutes of Health, Bethesda, MD) and the Chothia
numbering scheme (Al-Lazikani et al., (1997)
JMB 273,927-948).

| Candidate | LCDR1 | ID | LCDR2 | ID | LCDR3 | ID |
|---|---|---|---|---|---|---|
| 139109 | RASQSISSYLN | 1086 | AASSLQS | 1087 | QQSYSTPYT | 1088 |
| 139103 | RASQSISSSFLA | 1089 | GASRRAT | 1090 | QQYHSSPSWT | 1091 |
| 139105 | RSSQSLLHSNGYNYLD | 1092 | LGSNRAS | 1093 | MQALQTPYT | 1094 |
| 139111 | KSSQSLLRNDGKTPLY | 1095 | EVSNRFS | 1096 | MQNIQFPS | 1097 |
| 139100 | RSSQSLLHSNGYNYLN | 1098 | LGSKRAS | 1099 | MQALQTPYT | 1100 |
| 139101 | RASQSISSYLN | 1101 | GASTLAS | 1102 | QQSYKRAS | 1103 |
| 139102 | RSSQSLLYSNGYNYVD | 1104 | LGSNRAS | 1105 | MQGRQFPYS | 1106 |
| 139104 | RASQSVSSNLA | 1107 | GASTRAS | 1108 | QQYGSSLT | 1109 |
| 139106 | RASQSVSSKLA | 1110 | GASIRAT | 1111 | QQYGSSSWT | 1112 |
| 139107 | RASQSVGSTNLA | 1113 | DASNRAT | 1114 | QQYGSSPPWT | 1115 |
| 139108 | RASQSISSYLN | 1116 | AASSLQS | 1117 | QQSYTLA | 1118 |
| 139110 | KSSESLVHNSGKTYLN | 1119 | EVSNRDS | 1120 | MQGTHWPGT | 1121 |
| 139112 | QASEDINKFLN | 1122 | DASTLQT | 1123 | QQYESLPLT | 1124 |
| 139113 | RASQSVGSNLA | 1125 | GASTRAT | 1126 | QQYNDWLPVT | 1127 |
| 139114 | RASQSIGSSSLA | 1128 | GASSRAS | 1129 | QQYAGSPPFT | 1130 |
| 149362 | KASQDIDDAMN | 1131 | SATSPVP | 1132 | LQHDNFPLT | 1133 |
| 149363 | RASQDIYNNLA | 1134 | AANKSQS | 1135 | QHYYRFPYS | 1136 |
| 149364 | RSSQSLLHSNGYNYLD | 1137 | LGSNRAS | 1138 | MQALQTPYT | 1139 |
| 149365 | GGNNIGTKSVH | 1140 | DDSVRPS | 1141 | QVWDSDSEHVV | 1142 |
| 149366 | SGDGLSKKYVS | 1143 | RDKERPS | 1144 | QAWDDTTVV | 1145 |
| 149367 | RASQGIRNWLA | 1146 | AASNLQS | 1147 | QKYNSAPFT | 1148 |
| 149368 | GGNNIGSKSVH | 1149 | GKNNRPS | 1150 | SSRDSSGDHL | 1151 |
| | | | | | RV | |
| 149369 | QGDSLGNYYAT | 1152 | GTNNRPS | 1153 | NSRDSSGHHLL | 1154 |
| BCMA_EBB- | RASQSVSSAYLA | 1155 | GASTRAT | 1156 | QHYGSSFNGS | 1157 |
| C1978-A4 | | | | | SLFT | |
| BCMA_EBB- | RASQSVSNSLA | 1158 | DASSRAT | 1159 | QQFGTSSGLT | 1217 |
| C1978-G1 | | | | | | |
| BCMA_EBB- | RASQSVSSSFLA | 1218 | GASSRAT | 1219 | QQYHSSPSWT | 1220 |
| C1979-C1 | | | | | | |
| BCMA_EBB- | RASQSVSTTFLA | 1160 | GSSNRAT | 1161 | QQYHSSPSWT | 1162 |
| C1978-C7 | | | | | | |
| BCMA_EBB- | RASQSISSYLN | 1163 | AASSLQS | 1164 | QQSYSTPYS | 1165 |
| C1978-D10 | | | | | | |
| BCMA_EBB- | RATQSIGSSFLA | 1166 | GASQRAT | 1167 | QHYESSPSWT | 1168 |
| C1979-C12 | | | | | | |
| BCMA_EBB- | RASQSVSSSYLA | 1169 | GASSRAT | 1170 | QQYGSPPRFT | 1171 |
| C1980-G4 | | | | | | |
| BCMA_EBB- | RASQSVSSSYLA | 1172 | GASSRAT | 1173 | QHYGSSPSWT | 1174 |
| C1980-D2 | | | | | | |
| BCMA_EBB- | RASQRVASNYLA | 1175 | GASSRAT | 1176 | QHYDSSPSWT | 1178 |
| C1978-A10 | | | | | | |
| BCMA_EBB- | RASQSLSSNFLA | 1179 | GASNWAT | 1180 | QYYGTSPMYT | 1181 |
| C1978-D4 | | | | | | |
| BCMA_EBB- | RSSQSLLHSNGYNYLD | 1182 | LGSNRAS | 1183 | MQALQTPLT | 1184 |
| C1980-A2 | | | | | | |
| BCMA_EBB- | RASQSVSSSYLA | 1185 | GTSSRAT | 1186 | QHYGNSPPKFT | 1187 |
| C1981-C3 | | | | | | |
| BCMA_EBB- | RASQSVASSFLA | 1189 | GASGRAT | 1190 | QHYGGSPRLT | 1191 |
| C1978-G4 | | | | | | |
| A7D12.2 | RASQDVNTAVS | 1192 | SASYRYT | 1193 | QQHYSTPWT | 1194 |
| C11D5.3 | RASESVSVIGAHLIH | 1195 | LASNLET | 1196 | LQSRIFPRT | 1197 |
| C12A3.2 | RASESVTILGSHLIY | 1198 | LASNVQT | 1199 | LQSRTIPRT | 1200 |
| C13F12.1 | RASESVTILGSHLIY | 1201 | LASNVQT | 1202 | LQSRTIPRT | 1203 |

### Exemplary Components of the CAR Molecules:

Leader (amino acid sequence)

(SEQ ID NO: 362)

MALPVTALLLPLALLLHAARP
leader (nucleic acid sequence)

(SEQ ID NO: 363)

ATGGCCCTGCCTGTGACAGCCCTGCTGCTGCCTCTGGCTCTGCTGCTGCA
TGCCGCTAGACCC
leader (nucleic acid sequence)

(SEQ ID NO: 364)

ATGGCCCTCCCTGTCACCGCCCTGCTGCTTCCGCTGGCTCTTCTGCTCCA
CGCCGCTCGGCCC
CD8 hinge (amino acid sequence)

(SEQ ID NO: 365)

TTTPAPRPPTPAPTIASQPLSLRPEACRPAAGGAVHTRGLDFACD
CD8 hinge (nucleic acid sequence)

(SEQ ID NO: 366)

ACCACGACGCCAGCGCCGCGACCACCAACACCGGCGCCCACCATCGCGTC
GCAGCCCCTGTCCCTGCGCCCAGAGGCGTGCCGGCCAGCGGCGGGGGGCG
CAGTGCACACGAGGGGGCTGGACTTCGCCTGTGAT
CD8 transmembrane (amino acid sequence)

(SEQ ID NO: 367)

IYIWAPLAGTCGVLLLSLVITLYC
CD8 transmembrane (nucleic acid sequence)

(SEQ ID NO: 368)

ATCTACATCTGGGCGCCCTTGGCCGGGACTTGTGGGGTCCTTCTCCTGTC
ACTGGTTATCACCCTTTACTGC
CD8 transmembrane (nucleic acid sequence)

(SEQ ID NO: 369)

ATCTACATTTGGGCCCCTCTGGCTGGTACTTGCGGGGTCCTGCTGCTTTC
ACTCGTGATCACTCTTTACTGT
4-1BB Intracellular domain (amino acid sequence)

(SEQ ID NO: 370)

KRGRKKLLYIFKQPFMRPVQTTQEEDGCSCRFPEEEEGGCEL
4-1BB Intracellular domain (nucleic acid sequence)

(SEQ ID NO: 371)

AAACGGGGCAGAAAGAAACTCCTGTATATATTCAAACAACCATTTATGAG
ACCAGTACAAACTACTCAAGAGGAAGATGGCTGTAGCTGCCGATTTCCAG
AAGAAGAAGAAGGAGGATGTGAACTG
4-1BB Intracellular domain (nucleic acid sequence)

(SEQ ID NO: 372)

AAGCGCGGTCGGAAGAAGCTGCTGTACATCTTTAAGCAACCCTTCATGAG
GCCTGTGCAGACTACTCAAGAGGAGGACGGCTGTTCATGCCGGTTCCCAG
AGGAGGAGGAAGGCGGCTGCGAACTG
CD28 Intracellular domain (amino acid sequence)

(SEQ ID NO: 373)

RSKRSRLLHSDYMNMTPRRPGPTRKHYQPYAPPRDFAAYRS
CD28 Intracellular domain (nucleotide sequence)

(SEQ ID NO: 374)

AGGAGTAAGAGGAGCAGGCTCCTGCACAGTGACTACATGAACATGACTCC
CCGCCGCCCCGGGCCCACCCGCAAGCATTACCAGCCCTATGCCCCACCAC
GCGACTTCGCAGCCTATCGCTCC
ICOS Intracellular domain (amino acid sequence)

(SEQ ID NO: 375)

T K K K Y S S S V H D P N G E Y M F M R A V N T A
K K S R L T D V T L
ICOS Intracellular domain (nucleotide sequence)

(SEQ ID NO: 376)

ACAAAAAAGAAGTATTCATCCAGTGTGCACGACCCTAACGGTGAATACAT
GTTCATGAGAGCAGTGAACACAGCCAAAAAATCCAGACTCACAGATGTGA
CCCTA
CD3 zeta domain (amino acid sequence)

(SEQ ID NO: 377)

RVKFSRSADAPAYKQGQNQLYNELNLGRREEYDVLDKRRGRDPEMGGKPR
RKNPQEGLYNELQKDKMAEAYSEIGMKGERRRGKGHDGLYQGLSTATKDT
YDALHMQALPPR
CD3 zeta (nucleic acid sequence)

(SEQ ID NO: 378)

AGAGTGAAGTTCAGCAGGAGCGCAGACGCCCCCGCGTACAAGCAGGGCCA
GAACCAGCTCTATAACGAGCTCAATCTAGGACGAAGAGAGGAGTACGATG
TTTTGGACAAGAGACGTGGCCGGGACCCTGAGATGGGGGGAAAGCCGAGA
AGGAAGAACCCTCAGGAAGGCCTGTACAATGAACTGCAGAAAGATAAGAT
GGCGGAGGCCTACAGTGAGATTGGGATGAAAGGCGAGCGCCGGAGGGGCA
AGGGGCACGATGGCCTTTACCAGGGTCTCAGTACAGCCACCAAGGACACC
TACGACGCCCTTCACATGCAGGCCCTGCCCCCTCGC
CD3 zeta (nucleic acid sequence)

(SEQ ID NO: 379)

CGCGTGAAATTCAGCCGCAGCGCAGATGCTCCAGCCTACAAGCAGGGGCA
GAACCAGCTCTACAACGAACTCAATCTTGGTCGGAGAGAGGAGTACGACG
TGCTGGACAAGCGGAGAGGACGGGACCCAGAAATGGGCGGGAAGCCGCGC
AGAAAGAATCCCCAAGAGGGCCTGTACAACGAGCTCCAAAAGGATAAGAT
GGCAGAAGCCTATAGCGAGATTGGTATGAAAGGGGAACGCAGAAGAGGCA
AAGGCCACGACGGACTGTACCAGGGACTCAGCACCGCCACCAAGGACACC
TATGACGCTCTTCACATGCAGGCCCTGCCGCCTCGG
CD3 zeta domain (amino acid sequence; NCBI
Reference NM_000734.3)

(SEQ ID NO: 380)

RVKFSRSADAPAYQQGQNQLYNELNLGRREEYDVLDKRRGRDPEMGGKPR
RKNPQEGLYNELQKDKMAEAYSEIGMKGERRRGKGHDGLYQGLSTATKDT
YDALHMQALPPR
CD3 zeta (nucleic acid sequence; NCBI Reference
Sequence NM_000734.3);

(SEQ ID NO: 381)

AGAGTGAAGTTCAGCAGGAGCGCAGACGCCCCCGCGTACCAGCAGGGCCA
GAACCAGCTCTATAACGAGCTCAATCTAGGACGAAGAGAGGAGTACGATG
TTTTGGACAAGAGACGTGGCCGGGACCCTGAGATGGGGGGAAAGCCGAGA
AGGAAGAACCCTCAGGAAGGCCTGTACAATGAACTGCAGAAAGATAAGAT
GGCGGAGGCCTACAGTGAGATTGGGATGAAAGGCGAGCGCCGGAGGGGCA
AGGGGCACGATGGCCTTTACCAGGGTCTCAGTACAGCCACCAAGGACACC
TACGACGCCCTTCACATGCAGGCCCTGCCCCCTCGC
IgG4 Hinge (amino acid sequence)

(SEQ ID NO: 382)

ESKYGPPCPPCPAPEFLGGPSVFLFPPKPKDTLMISRTPEVTCVVVDVSQ
EDPEVQFNWYVDGVEVHNAKTKPREEQFNSTYRVVSVLTVLHQDWLNGKE
YKCKVSNKGLPSSIEKTISKAKGQPREPQVYTLPPSQEEMTKNQVSLTCL
VKGFYPSDIAVEWESNGQPENNYKTTPPVLDSDGSFFLYSRLTVDKSRWQ
EGNVFSCSVMHEALHNHYTQKSLSLSLGKM
IgG4 Hinge (nucleotide sequence)

(SEQ ID NO: 383)

GAGAGCAAGTACGGCCCTCCCTGCCCCCCTTGCCCTGCCCCCGAGTTC
CTGGGCGGACCCAGCGTGTTCCTGTTCCCCCCCAAGCCCAAGGACACCCT
GATGATCAGCCGGACCCCCGAGGTGACCTGTGTGGTGGTGGACGTGTCCC
AGGAGGACCCCGAGGTCCAGTTCAACTGGTACGTGGACGGCGTGGAGGTG
CACAACGCCAAGACCAAGCCCCGGGAGGAGCAGTTCAATAGCACCTACCG
GGTGGTGTCCGTGCTGACCGTGCTGCACCAGGACTGGCTGAACGGCAAGG
AATACAAGTGTAAGGTGTCCAACAAGGGCCTGCCCAGCAGCATCGAGAAA
ACCATCAGCAAGGCCAAGGGCCAGCCTCGGGAGCCCCAGGTGTACACCCT
GCCCCCTAGCCAAGAGGAGATGACCAAGAACCAGGTGTCCCTGACCTGCC
TGGTGAAGGGCTTCTACCCCAGCGACATCGCCGTGGAGTGGGAGAGCAAC
GGCCAGCCCGAGAACAACTACAAGACCACCCCCCCTGTGCTGGACAGCGA
CGGCAGCTTCTTCCTGTACAGCCGGCTGACCGTGGACAAGAGCCGGTGGC
AGGAGGGCAACGTCTTTAGCTGCTCCGTGATGCACGAGGCCCTGCACAAC
CACTACACCCAGAAGAGCCTGAGCCTGTCCCTGGGCAAGATG.

[0406] In an embodiment, the CAR molecule comprises a mesothelin CAR described herein, e.g., a mesothelin CAR described in WO 2015/090230, incorporated herein by reference. In embodiments, the mesothelin CAR comprises an amino acid, or has a nucleotide sequence shown in WO 2015/090230 incorporated herein by reference, or a sequence substantially identical to any of the aforesaid sequences (e.g., at least 85%, 90%, 95% or more identical to any of the aforesaid mesothelin CAR sequences). In one embodiment, the CAR molecule comprises a mesothelin CAR, or an antigen binding domain according to Tables 2-3 of WO 2015/090230, incorporated herein by reference, or a sequence substantially identical thereto (e.g., at least 85%, 90%, 95% or more identical thereto). The amino acid and nucleotide sequences encoding the mesothelin CAR molecules and antigen binding domains (e.g., including one, two, three VH CDRs; and one, two, three VL CDRs according to Kabat or Chothia), are specified in WO 2015/090230.

[0407] In an embodiment, the CAR molecule comprises a CLL1 CAR described herein, e.g., a CLL1 CAR described in US2016/0051651A1, incorporated herein by reference. In embodiments, the CLL1 CAR comprises an amino acid, or has a nucleotide sequence shown in US2016/0051651A1, incorporated herein by reference, or a sequence substantially identical to any of the aforesaid sequences (e.g., at least 85%, 90%, 95% or more identical to any of the aforesaid CLL1 CAR sequences).

[0408] In other embodiments, the CLL1 CAR includes a CAR molecule, or an antigen binding domain according to Table 2 of WO2016/014535, incorporated herein by reference, or a sequence substantially identical to any of the aforesaid sequences (e.g., at least 85%, 90%, 95% or more identical to any of the aforesaid CLL1 CAR sequences). The amino acid and nucleotide sequences encoding the CLL-1 CAR molecules and antigen binding domains (e.g., including one, two, three VH CDRs; and one, two, three VL CDRs according to Kabat or Chothia), are specified in WO2016/014535.

[0409] In an embodiment, the CAR molecule comprises a CD33 CAR described herein, e.g., a CD33 CAR described in US2016/0096892A1, incorporated herein by reference. In embodiments, the CD33 CAR comprises an amino acid, or has a nucleotide sequence shown in US2016/0096892A1, incorporated herein by reference, or a sequence substantially identical to any of the aforesaid sequences (e.g., at least 85%, 90%, 95% or more identical to any of the aforesaid CD33 CAR sequences). In other embodiments, the CD33 CAR CAR or antigen binding domain thereof can include a CAR molecule (e.g., any of CAR33-1 to CAR-33-9), or an antigen binding domain according to Table 2 or 9 of WO2016/014576, incorporated herein by reference, or a sequence substantially identical to any of the aforesaid sequences (e.g., at least 85%, 90%, 95% or more identical to any of the aforesaid CD33 CAR sequences). The amino acid and nucleotide sequences encoding the CD33 CAR molecules and antigen binding domains (e.g., including one, two, three VH CDRs; and one, two, three VL CDRs according to Kabat or Chothia), are specified in WO2016/014576.

[0410] In embodiments, the CAR molecule comprises a CD123 CAR described herein, e.g., a CD123 CAR described in US2014/0322212A1 or US2016/0068601A1, both incorporated herein by reference. In embodiments, the CD123 CAR comprises an amino acid, or has a nucleotide sequence shown in US2014/0322212A1 or US2016/0068601A1, both incorporated herein by reference, or a sequence substantially identical to any of the aforesaid sequences (e.g., at least 85%, 90%, 95% or more identical to any of the aforesaid CD123 CAR sequences). In one embodiment, the CAR molecule comprises a CD123 CAR (e.g., any of the CAR1-CAR8), or an antigen binding domain according to Tables 1-2 of WO 2014/130635, incorporated herein by reference, or a sequence substantially identical thereto (e.g., at least 85%, 90%, 95% or more identical to any of the aforesaid CD123 CAR sequences). The amino acid and nucleotide sequences encoding the CD123 CAR molecules and antigen binding domains (e.g., including one, two, three VH CDRs; and one, two, three VL CDRs according to Kabat or Chothia), are specified in WO 2014/130635.

[0411] In other embodiments, the CAR molecule comprises a CD123 CAR comprises a CAR molecule (e.g., any of the CAR123-1 to CAR123-4 and hzCAR123-1 to hzCAR123-32), or an antigen binding domain according to Tables 2, 6, and 9 of WO2016/028896, incorporated herein by reference, or a sequence substantially identical thereto (e.g., at least 85%, 90%, 95% or more identical to any of the aforesaid CD123 CAR sequences). The amino acid and nucleotide sequences encoding the CD123 CAR molecules and antigen binding domains (e.g., including one, two, three VH CDRs; and one, two, three VL CDRs according to Kabat or Chothia), are specified in WO2016/028896.

[0412] In an embodiment, the CAR molecule comprises an EGFRvIII CAR molecule described herein, e.g., an EGFRvIII CAR described US2014/0322275A1, incorporated herein by reference. In embodiments, the EGFRvIII CAR comprises an amino acid, or has a nucleotide sequence shown in US2014/0322275A1, incorporated herein by reference, or a sequence substantially identical to any of the aforesaid sequences (e.g., at least 85%, 90%, 95% or more identical to any of the aforesaid EGFRvIII CAR sequences). In one embodiment, the CAR molecule comprises an EGFRvIII CAR, or an antigen binding domain according to Table 2 or SEQ ID NO:11 of WO 2014/130657, incorporated herein by reference, or a sequence substantially identical thereto (e.g., at least 85%, 90%, 95% or more identical thereto). The amino acid and nucleotide sequences encoding the EGFRvIII CAR molecules and antigen binding domains (e.g., including one, two, three VH CDRs; and one, two, three VL CDRs according to Kabat or Chothia), are specified in WO 2014/130657.

[0413] In other embodiments, the CAR molecule comprises an a GFR ALPHA-4 CAR, e.g., can include a CAR molecule, or an antigen binding domain according to Table 2 of WO2016/025880, incorporated herein by reference, or a sequence substantially identical to any of the aforesaid sequences (e.g., at least 85%, 90%, 95% or more identical to any of the aforesaid GFR ALPHA-4 sequences). The amino acid and nucleotide sequences encoding the GFR ALPHA-4 CAR molecules and antigen binding domains (e.g., including one, two, three VH CDRs; and one, two, three VL CDRs according to Kabat or Chothia), are specified in WO2016/025880.

### Therapeutic Methods

[0414] In one aspect, the disclosure provides methods for treating a disease associated with expression of a tumor antigen described herein. In some embodiments, immune effector cells are assayed by a method described herein, and the cells are administered to a subject as part of a treatment described herein. For example, the immune effector cells can be administered as part of a combination therapy described herein.

### Hematologic Cancer

[0415] Hematological cancer conditions are types of cancer such as leukemia and malignant lymphoproliferative conditions that affect blood, bone marrow and the lymphatic system.

[0416] Leukemia can be classified as acute leukemia and chronic leukemia. Acute leukemia can be further classified as acute myelogenous leukemia (AML) and acute lymphoid leukemia (ALL) (e.g., pediatric ALL). Chronic leukemia includes chronic myelogenous leukemia (CML) and chronic lymphoid leukemia (CLL). Other related conditions include myelodysplastic syndromes (MDS, formerly known as “preleukemia”) which are a diverse collection of hematological conditions united by ineffective production (or dysplasia) of myeloid blood cells and risk of transformation to AML.

[0417] Lymphoma is a group of blood cell tumors that develop from lymphocytes. Exemplary lymphomas include non-Hodgkin lymphoma and Hodgkin lymphoma.

[0418] The present disclosure provides for compositions and methods for treating cancer. In one aspect, the cancer is a hematologic cancer including but is not limited to a leukemia or a lymphoma. In one aspect, the CAR-expressing cells (e.g., T cells, NK cells) of the invention may be used to treat cancers and malignancies such as, but not limited to, e.g., acute leukemias including but not limited to, e.g., B-cell acute lymphoid leukemia (“B-ALL”), T-cell acute lymphoid leukemia (“T-ALL”), acute lymphoid leukemia (ALL); one or more chronic leukemias including but not limited to, e.g., chronic myelogenous leukemia (CML), chronic lymphocytic leukemia (CLL); additional hematologic cancers or hematologic conditions including, but not limited to, e.g., B cell promyelocytic leukemia, blastic plasmacytoid dendritic cell neoplasm, Burkitt's lymphoma, diffuse large B cell lymphoma, follicular lymphoma, hairy cell leukemia, small cell- or a large cell-follicular lymphoma, malignant lymphoproliferative conditions, MALT lymphoma, mantle cell lymphoma (MCL), marginal zone lymphoma, multiple myeloma, myelodysplasia and myelodysplastic syndrome, non-Hodgkin lymphoma, Hodgkin lymphoma, plasmablastic lymphoma, plasmacytoid dendritic cell neoplasm, Waldenstrom macroglobulinemia, and “preleukemia” which are a diverse collection of hematological conditions united by ineffective production (or dysplasia) of myeloid blood cells, and the like.

[0419] In one aspect, the present disclosure provides methods of treating cancer (e.g., a hematological cancer such as ALL and CLL) by providing to the subject in need thereof immune effector cells (e.g., T cells, NK cells) that are engineered to express a CAR. In one embodiment, the cancer to be treated is a B cell malignancy. In one embodiment, the cancer to be treated is ALL (acute lymphoblastic leukemia), CLL (chronic lymphocytic leukemia), DLBCL (diffuse large B-cell lymphoma), MCL (Mantle cell lymphoma, or MM (multiple myeloma).

[0420] In one aspect, the disclosure provides methods of treating cancer (e.g., a hematological cancer such as ALL and CLL) by providing to the subject in need thereof immune effector cells (e.g., T cells, NK cells) that are engineered to express a CD19 CAR, wherein the cancer cells express CD19. In one embodiment, the cancer to be treated is a B cell malignancy. In one embodiment, the cancer to be treated is ALL (acute lymphoblastic leukemia), CLL (chronic lymphocytic leukemia), DLBCL (diffuse large B-cell lymphoma), MCL (Mantle cell lymphoma), Hodgkin lymphoma, or MM (multiple myeloma).

[0421] In one aspect, the present invention provides methods of treating cancer (e.g., a hematological cancer such as ALL and CLL) by providing to the subject in need thereof immune effector cells (e.g., T cells, NK cells) that are engineered to express a CD22 CAR, wherein the cancer cells express CD22. In one embodiment, the cancer to be treated is a B cell malignancy. In one embodiment, the cancer to be treated is ALL (acute lymphoblastic leukemia), CLL (chronic lymphocytic leukemia), DLBCL (diffuse large B-cell lymphoma), MCL (Mantle cell lymphoma), Hodgkin lymphoma, or MM (multiple myeloma).

[0422] In one aspect, the present invention provides methods of treating cancer (e.g., a hematological cancer such as ALL and CLL) by providing to the subject in need thereof immune effector cells (e.g., T cells, NK cells) that are engineered to express a CD20 CAR, wherein the cancer cells express CD20. In one embodiment, the cancer to be treated is a B cell malignancy. In one embodiment, the cancer to be treated is ALL (acute lymphoblastic leukemia), CLL (chronic lymphocytic leukemia), DLBCL (diffuse large B-cell lymphoma), MCL (Mantle cell lymphoma), Hodgkin lymphoma, or MM (multiple myeloma).

[0423] In one aspect, the present invention provides methods of treating cancer (e.g., a hematological cancer such as ALL and CLL) by providing to the subject in need thereof immune effector cells (e.g., T cells, NK cells) that are engineered to express a ROR1 CAR, wherein the cancer cells express ROR1. In one embodiment, the cancer to be treated is a B cell malignancy. In one embodiment, the cancer to be treated is ALL (acute lymphoblastic leukemia), CLL (chronic lymphocytic leukemia), DLBCL (diffuse large B-cell lymphoma), MCL (Mantle cell lymphoma), Hodgkin lymphoma, or MM (multiple myeloma).

[0424] The disclosure includes a type of cellular therapy where immune effector cells (e.g., T cells, NK cells) are genetically modified (e.g., via transduction of a lentiviral vector) to express a CAR and the CAR-expressing cell is infused to a recipient in need thereof. The infused cell is able to kill tumor cells in the recipient. Unlike antibody therapies, CAR-modified immune effector cells (e.g., T cells, NK cells) are able to replicate in vivo resulting in long-term persistence that can lead to sustained tumor control. CAR-expressing cells (e.g., T cells or NK cells) generated using lentiviral vectors will have stable CAR expression. In various aspects, the immune effector cells (e.g., T cells, NK cells) administered to the patient, or their progeny, persist in the patient for at least four months, five months, six months, seven months, eight months, nine months, ten months, eleven months, twelve months, thirteen months, fourteen month, fifteen months, sixteen months, seventeen months, eighteen months, nineteen months, twenty months, twenty-one months, twenty-two months, twenty-three months, two years, three years, four years, or five years after administration of the T cell to the patient.

[0425] The invention also includes a type of cellular therapy where immune effector cells (e.g., T cells, NK cells) are modified, e.g., by in vitro transcribed RNA, to transiently express a CAR and the CAR-expressing cell is infused to a recipient in need thereof. CAR-expressing cells (e.g., T cells, NK cells) generated through transduction of CAR RNA (e.g., by transfection or electroporation) transiently express RNA CARs for 4, 5, 6, 7, 8, 9, 10, 11, 12, 13, 14, 15 days after transduction. The infused cell is able to kill tumor cells in the recipient. Thus, in various aspects, the immune effector cells (e.g., T cells, NK cells) administered to the patient, is present for less than one month, e.g., three weeks, two weeks, one week, after administration of the T cell to the patient.

[0426] In one aspect, the present disclosure provides methods of treating cancer (e.g., a hematological cancer such as ALL and CLL) by providing to the subject in need thereof immune effector cells (e.g., T cells, NK cells) that are engineered to express a CAR, e.g., a CAR described herein.

[0427] In one embodiment, the present disclosure provides methods of treating cancer (e.g., a hematological cancer such as ALL and CLL) by providing to the subject in need thereof immune effector cells (e.g., T cells, NK cells) that are engineered to express a CAR that specifically targets or binds to a tumor antigen (or cancer associated antigen) described herein. In other embodiments, the methods provide treating a cancer (e.g., a hematological cancer such as ALL and CLL) by providing to the subject a cancer therapy other than a CAR therapy, e.g., providing the subject a treatment that is the standard of care for that particular type of cancer. In yet another embodiment, the method of treatment includes altering the manufacturing of a CAR-expressing cell to enrich for naïve T cells, e.g., as described herein, for a subject prior to administering a CAR-expressing cell, e.g., a CAR-expressing cell described herein.

CD19 Associated Diseases and/or Disorders

[0428] In one aspect, the disclosure provides methods for treating cancer, e.g., a cancer associated with CD19 expression, with a CAR-expressing cell (e.g., T cell, NK cell) therapy. Exemplary cancers include, but are not limited to e.g., one or more acute leukemias including but not limited to, e.g., B-cell acute lymphocytic leukemia (“B-ALL”), T-cell acute lymphocytic leukemia (“T-ALL”), acute lymphocytic leukemia (ALL); one or more chronic leukemias including but not limited to, e.g., chronic myelogenous leukemia (CML), chronic lymphocytic leukemia (CLL). Additional cancers or hematologic conditions associated with expression of CD19 include, but are not limited to, e.g., B cell promyelocytic leukemia, blastic plasmacytoid dendritic cell neoplasm, Burkitt's lymphoma, diffuse large B cell lymphoma, follicular lymphoma, hairy cell leukemia, small cell- or a large cell-follicular lymphoma, malignant lymphoproliferative conditions, MALT lymphoma, mantle cell lymphoma (MCL), marginal zone lymphoma, multiple myeloma, myelodysplasia and myelodysplastic syndrome, non-Hodgkin lymphoma, Hodgkin lymphoma, plasmablastic lymphoma, plasmacytoid dendritic cell neoplasm, Waldenstrom macroglobulinemia, and “preleukemia” which are a diverse collection of hematological conditions united by ineffective production (or dysplasia) of myeloid blood cells, and the like. Further, a disease associated with CD19 expression include, but not limited to, e.g., atypical and/or non-classical cancers, malignancies, precancerous conditions or proliferative diseases associated with expression of CD19.

[0429] In one embodiment, the disclosure provides methods for treating CLL.

[0430] In another embodiment, the disclosure provides methods for treating ALL.

[0431] In another embodiment, the disclosure provides methods for treating B-cell ALL.

[0432] In an embodiment, standard of care for CLL includes, but is not limited to exemplary therapies described herein, e.g., described in Table 5, and combinations thereof.

TABLE 5
Exemplary therapies for CLL

| | w/o del | | |
|---|---|---|---|
| | (11q) or | del | del |
| | del (17p) | (17p) | (11q) |
| First line ≥70 yrs with comorbidities | | | |
| Obinutuzumab + chlorambucil | X | X | X |
| Rituxan + chlorambucil | X | | X |
| Rituxan | X | | |
| Chlorambucil | X | | |
| Fludarabine ± Rituxan | X | X | |
| Cladribine | X | | |
| Bendamustine ± Rituxan | X | | X |
| PCR (pentostatin, cyclophosphamide, Rituxan) | X | | X |
| First line <70 yrs without significant | | | |
| comorbidities | | | |
| FCR (Fludarabine, cyclophosphamide, Rituxan) | X | X | X |
| FR (Fludarabine, Rituxan) | X | X | |
| PCR | X | | X |
| Bendamustine ± Rituxan | X | | X |
| Obinutuzumab + chlorambucil | X | X | X |
| Second line- Relapsed/Refractory ≥70 years | | | |
| Imbruvica | X | X | X |
| Reduced-dose FCR | X | | X |
| Reduced-dose PCRR | X | | X |
| Bendamustine ± Rituxan | X | | X |
| Ofatumumab | X | X | X |
| Alemutuzumab + Rituxan | X | X | X |
| High dose methylprednisone (HDMP) + | X | X | X |
| rituximab | | | |
| Lenalidomide + Rituxan | X | X | X |
| Dose dense rituximab | X | | X |
| Second line- Relapsed/Refractory < years | | | |
| without significant comorbidities | | | |
| Imbruvica | X | X | X |
| FCR (Fludarabine, cyclophosphaide, Rituxan) | X | | X |
| PCR | X | | X |
| Bendamustine ± Rituxan | X | | X |
| Fludarabine + alemtuzumab | X | | X |
| R-CHOP (Rituxan, cyclophosphamide, | X | X | X |
| dosorubicin, vincristine, prednisone) | | | |
| Ofatumumab | X | X | X |
| OFAR (oxaliplatin, Fludara, cytarabine, | X | X | X |
| Rituxan) | | | |
| HDMP + rituximab | X | X | X |
| Lenalidomide + Rituxan | X | X | X |

[0433] In an embodiment, standard of care for CLL includes (1) radiation therapy, (2) chemotherapy, (3) surgery (e.g., removal of the spleen), (4) targeted therapy, (5) stem cell transplantation, and combinations thereof. In an embodiment, the standard of care comprises external radiation therapy. In an embodiment, the standard of care comprises internal radiation therapy (e.g., a radioactive substance sealed in needles, wires or catheters, for example, that are placed directly into or near the cancer).

[0434] In an embodiment, standard of care for ALL includes, but is not limited to exemplary therapies described herein, e.g., described in Table 6, and combinations thereof.

TABLE 6
Exemplary therapies for ALL

First Line
RCHOP (Rituxan, cyclophosphamide, doxorubicin, vincristine,
prednisone)
Dose dense RCHOP 14 (category 3)
Dose adjusted EPOCH (etoposide, prednisone, vincristine,
cyclophosphamide, doxorubicin) + Rituxan
First Line Therapy for subjects with Poor left ventricular function or
very frail
RCEPP (rituximab, cyclophosphamide, etoposide, prednisone,
procarbazine)
RCEOP (rituximab, cyclophosphamide, etoposide, vincristine,
prednisone)
RCNOP (rituximab, cyclophosphamide, mitoxantrone, vincristine,
prednisone)
RCEOP (rituximab, cyclophosphamide, etoposide, vincristine,
prednisone)
Dose adjusted EPOCH (etoposide, prednisone, vincristine,
cyclophosphamide, doxorubicin) + Rituxan
Second line- proceed to high dose therapy with autologous stem cell
rescue
DHAP (dexamethasone, cisplatin, cytarabine) ± Rituxan
ESHAP (etoposide, methylprednisolone, cytarabine, cisplatin) ± Rituxan
GDP (gemcitabine, dexamethasone, cisplatin) ± Rituxan
GemOx (gemcitabine, oxaliplatin) ± Rituxan
ICE (ifosfamide, carboplatin, etoposide) + Rituxan
MINE (mesna, ifosfamide, mitoxantrone, etoposide) ± Rituxan
Second-line therapy (non-candidates for high-dose therapy)
CEPP (cyclophosphamide, etoposide, prednisone, procarbazine) ± Rituxan
CEOP (cyclophosphamide, etoposide, vincristine, prednisone) ± Rituxan
DA-EPOCH ± Rituxan
Revlimid ± Rituxan
Rituxan
GemOx ± Rituxan
GDP ± Rituxan
Bendamustine + Rituxan

[0435] In an embodiment, standard of care for ALL includes (1) chemotherapy, (2) radiation therapy, (3) stem cell transplantation, (4) biological therapy, (5) targeted therapy, and combinations thereof.

[0436] In an embodiment, the standard of care includes, but is not limited to, fludarabine with cyclophosphamide (FC); fludarabine with rituximab (FR); fludarabine, cyclophosphamide, and rituximab (FCR); cyclophosphamide, doxorubicin, vincristine and prednisone (CHOP); and combinations thereof. General chemotherapeutic agents considered for use include, but are not limited to anastrozole (Arimidex®), bicalutamide (Casodex®), bleomycin sulfate (Blenoxane®), busulfan (Myleran®), busulfan injection (Busulfex®), capecitabine (Xeloda®), N4-pentoxycarbonyl-5-deoxy-5-fluorocytidine, carboplatin (Paraplatin®), carmustine (BiCNU®), chlorambucil (Leukeran®), cisplatin (Platinol®), cladribine (Leustatin®), cyclophosphamide (Cytoxan® or Neosar®), cytarabine, cytosine arabinoside (Cytosar-U®), cytarabine liposome injection (DepoCyt®), dacarbazine (DTIC-Dome®), dactinomycin (Actinomycin D, Cosmegan), daunorubicin hydrochloride (Cerubidine®), daunorubicin citrate liposome injection (DaunoXome®), dexamethasone, docetaxel (Taxotere®), doxorubicin hydrochloride (Adriamycin®, Rubex®), etoposide (Vepesid®), fludarabine phosphate (Fludara®), 5-fluorouracil (Adrucil®, Efudex®), flutamide (Eulexin®), tezacitibine, Gemcitabine (difluorodeoxycitidine), hydroxyurea (Hydrea®), Idarubicin (Idamycin®), ifosfamide (IFEX®), irinotecan (Camptosar®), L-asparaginase (ELSPAR®), leucovorin calcium, melphalan (Alkeran®), 6-mercaptopurine (Purinethol®), methotrexate (Folex®), mitoxantrone (Novantrone®), mylotarg, paclitaxel (Taxol®), phoenix (Yttrium90/MX-DTPA), pentostatin, polifeprosan 20 with carmustine implant (Gliadel®), tamoxifen citrate (Nolvadex®), teniposide (Vumon®), 6-thioguanine, thiotepa, tirapazamine (Tirazone®), topotecan hydrochloride for injection (Hycamptin®), vinblastine (Velban®), vincristine (Oncovin®), vinorelbine (Navelbine®), and combinations thereof.

[0437] In an embodiment, chemotherapy comprises an antimetabolite, including, but not limited to, folic acid antagonists (also referred to herein as antifolates), pyrimidine analogs, purine analogs and adenosine deaminase inhibitors): methotrexate (Rheumatrex®, Trexall®), 5-fluorouracil (Adrucil®, Efudex®, Fluoroplex®), floxuridine (FUDF®), cytarabine (Cytosar-U®, Tarabine PFS), 6-mercaptopurine (Puri-Nethol®)), 6-thioguanine (Thioguanine Tabloid®), fludarabine phosphate (Fludara®), pentostatin (Nipent®), pemetrexed (Alimta®), raltitrexed (Tomudex®), cladribine (Leustatin®), clofarabine (Clofarex®, Clolar®), cytarabine liposomal (also known as Liposomal Ara-C, DepoCyt™); decitabine (Dacogen®); hydroxyurea (Hydrea®, Droxia™ and Mylocel™); mercaptopurine (Puri-Nethol®), pralatrexate (Folotyn™) capecitabine (Xeloda®), nelarabine (Arranon®), azacitidine (Vidaza®) and gemcitabine (Gemzar®). Suitable antimetabolites include, e.g., 5-fluorouracil (Adrucil®, Efudex®, Fluoroplex®), floxuridine (FUDF®), capecitabine (Xeloda®), pemetrexed (Alimta®), raltitrexed (Tomudex®) and gemcitabine (Gemzar®), and combinations thereof. In an embodiment, the purine analogue is fludarabine.

[0438] In an embodiment, chemotherapy comprises an alkylating agent including, but not limited to nitrogen mustards, ethylenimine derivatives, alkyl sulfonates, nitrosoureas and triazenes, uracil mustard (Aminouracil Mustard®, Chlorethaminacil®, Demethyldopan®, Desmethyldopan®, Haemanthamine®, Nordopan®, Uracil nitrogen mustard®, Uracillost®, Uracilmostaza®, Uramustin®, Uramustine®), chlormethine (Mustargen®), cyclophosphamide (Cytoxan®, Neosar®, Clafen®, Endoxan®, Procytox®, Revimmune™), ifosfamide (Mitoxana®), melphalan (Alkeran®), Chlorambucil (Leukeran®), pipobroman (Amedel®, Vercyte®), triethylenemelamine (Hemel®, Hexalen®, Hexastat®), triethylenethiophosphoramine, Temozolomide (Temodar®), thiotepa (Thioplex®), busulfan (Busilvex®, Myleran®), carmustine (BiCNU®), lomustine (CeeNU®), streptozocin (Zanosar®), and Dacarbazine (DTIC-Dome®) and combinations thereof. Additional exemplary alkylating agents include, without limitation, Oxaliplatin (Eloxatin®); Temozolomide (Temodar® and Temodal®); Dactinomycin (also known as actinomycin-D, Cosmegen®); Melphalan (also known as L-PAM, L-sarcolysin, and phenylalanine mustard, Alkeran®); Altretamine (also known as hexamethylmelamine (HMM), Hexalen®); Carmustine (BiCNU®); Bendamustine (Treanda®); Busulfan (Busulfex® and Myleran®); Carboplatin (Paraplatin®); Lomustine (also known as CCNU, CeeNU®); Cisplatin (also known as CDDP, Platinol® and Platinol®-AQ); Chlorambucil (Leukeran®); Cyclophosphamide (Cytoxan® and Neosar®); Dacarbazine (also known as DTIC, DIC and imidazole carboxamide, DTIC-Dome®); Altretamine (also known as hexamethylmelamine (HMM), Hexalen®); Ifosfamide (Ifex®); Prednumustine; Procarbazine (Matulane®); Mechlorethamine (also known as nitrogen mustard, mustine and mechloroethamine hydrochloride, Mustargen®); Streptozocin (Zanosar®); Thiotepa (also known as thiophosphoamide, TESPA and TSPA, Thioplex®); Cyclophosphamide (Endoxan®, Cytoxan®, Neosar®, Procytox®, Revimmune®); Bendamustine HCl (Treanda®) and combinations thereof. In an embodiment, the alkylating agent is bendamustine. In an embodiment, the alkylating agent is cyclophosphamide.

[0439] In an embodiment, the chemotherapeutic agent is a kinase inhibitor, e.g., a tyrosine kinase inhibitor including, but not limited to, erlotinib hydrochloride (Tarceva®); linifanib (N-[4-(3-amino-1H-indazol-4-yl)phenyl]-N′-(2-fluoro-5-methylphenyl)urea, also known as ABT 869, available from Genentech); sunitinib malate (Sutent®); bosutinib (4-[(2,4-dichloro-5-methoxyphenyl)amino]-6-methoxy-7-[3-(4-methylpiperazin-1-yl)propoxy]quinoline-3-carbonitrile, also known as SKI-606, and described in U.S. Pat. No. 6,780,996); dasatinib (Sprycel®); pazopanib (Votrient®); sorafenib (Nexavar®); zactima (ZD6474); and imatinib or imatinib mesylate (Gilvec® and Gleevec®). In one embodiment, the kinase inhibitor is a BTK inhibitor selected from ibrutinib (PCI-32765); GDC-0834; RN-486; CGI-560; CGI-1764; HM-71224; CC-292; ONO-4059; CNX-774; and LFM-A13. In one embodiment, the kinase inhibitor is a CDK4 inhibitor selected from aloisine A; flavopiridol or HMR-1275, 2-(2-chlorophenyl)-5,7-dihydroxy-8-[(3S,4R)-3-hydroxy-1-methyl-4-piperidinyl]-4-chromenone; crizotinib (PF-02341066; 2-(2-Chlorophenyl)-5,7-dihydroxy-8-[(2R,3S)-2-(hydroxymethyl)-1-methyl-3-pyrrolidinyl]-4H-1-benzopyran-4-one, hydrochloride (P276-00); 1-methyl-5-[[2-[5-(trifluoromethyl)-1H-imidazol-2-yl]-4-pyridinyl]oxy]-N-[4-(trifluoromethyl)phenyl]-1H-benzimidazol-2-amine (RAF265); indisulam (E7070); roscovitine (CYC202); palbociclib (PD0332991); dinaciclib (SCH727965); N-[5-[[(5-tert-butyloxazol-2-yl)methyl]thio]thiazol-2-yl]piperidine-4-carboxamide (BMS 387032); 4-[[9-chloro-7-(2,6-difluorophenyl)-5H-pyrimido[5,4-d][2]benzazepin-2-yl]amino]-benzoic acid (MLN8054); 5-[3-(4,6-difluoro-1H-benzimidazol-2-yl)-1H-indazol-5-yl]-N-ethyl-4-methyl-3-pyridinemethanamine (AG-024322); 4-(2,6-dichlorobenzoylamino)-1H-pyrazole-3-carboxylic acid N-(piperidin-4-yl)amide (AT7519); 4-[2-methyl-1-(1-methylethyl)-1H-imidazol-5-yl]-N-[4-(methylsulfonyl)phenyl]-2-pyrimidinamine (AZD5438); and XL281 (BMS908662). In one embodiment, the kinase inhibitor is an MNK inhibitor selected from CGP052088; 4-amino-3-(p-fluorophenylamino)-pyrazolo [3,4-d] pyrimidine (CGP57380); cercosporamide; ETC-1780445-2; and 4-amino-5-(4-fluoroanilino)-pyrazolo [3,4-d] pyrimidine.

[0440] In an embodiment, targeted therapy includes, but is not limited to an anti-CD20 antibody or functional fragment thereof, such as, e.g., rituximab (Riuxan® and MabThera®); tositumomab (Bexxar®); and ofatumumab (Arzerra®), and combinations thereof. In one embodiment, the targeted therapy includes, but is not limited to, an anti-CD52 antibody or functional fragment thereof such as, e.g., alemtuzumab (Campath®).

[0441] In an embodiment, biologic therapy comprises immunotherapy. Exemplary anthracyclines include, without limitation, doxorubicin (Adriamycin® and Rubex®); bleomycin (lenoxane®); daunorubicin (dauorubicin hydrochloride, daunomycin, and rubidomycin hydrochloride, Cerubidine®); daunorubicin liposomal (daunorubicin citrate liposome, DaunoXome®); mitoxantrone (DHAD, Novantrone®); epirubicin (Ellence™); idarubicin (Idamycin®, Idamycin PFS®); mitomycin C (Mutamycin®); geldanamycin; herbimycin; ravidomycin; desacetylravidomycin and combinations thereof.

[0442] In an embodiment, stem cell transplantation comprises an autogeneic stem cell transplant. In an embodiment, stem cell transplantation comprises an allogenic stem cell transplant. In an embodiment, stem cell transplantation comprises allogeneic bone marrow transplantation. In an embodiment, stem cell transplantation comprises a hematopoietic stem cell transplantation (HSCT). In an embodiment, hematopoietic stem cells are derived from various tissues including, but not limited to bone marrow, peripheral blood, umbilical cord blood, and combinations thereof.

[0443] In one aspect, the disclosure provides methods for treating a disease associated with CD19 expression. In one aspect, the invention provides methods for treating a disease wherein part of the tumor is negative for CD19 and part of the tumor is positive for CD19. For example, provided methods are useful for treating subjects that have undergone treatment for a disease associated with elevated expression of CD19, wherein the subject that has undergone treatment for elevated levels of CD19 exhibits a disease associated with elevated levels of CD19.

[0444] In one aspect, provided methods comprise a vector comprising CD19 CAR operably linked to promoter for expression in mammalian cells (e.g., T cells or NK cells). In one aspect, provided methods comprise a recombinant cell (e.g., T cell or NK cell) expressing a CD19 CAR for use in treating CD19-expressing tumors, wherein the recombinant T cell expressing the CD19 CAR is termed a CD19 CAR-expressing cell. In one aspect, a CD19 CAR-expressing cell (e.g., T cell, NK cell) administered according to provided methods is capable of contacting a tumor cell with at least one CD19 CAR expressed on its surface such that the CAR-expressing cell targets the tumor cell and growth of the tumor is inhibited.

[0445] In one aspect, the disclosure features to a method of inhibiting growth of a CD19-expressing tumor cell, comprising contacting the tumor cell with a CD19 CAR-expressing cell (e.g., T cell, NK cell) described herein such that the CAR-expressing cell is activated in response to the antigen and targets the cancer cell, wherein the growth of the tumor is inhibited.

[0446] In one aspect, the disclosure includes a type of cellular therapy where T cells are genetically modified to express a CAR and the CAR-expressing cell (e.g., T cell, NK cell) is infused to a recipient in need thereof. The infused cell is able to kill tumor cells in the recipient. Unlike antibody therapies, CAR-modified cells (e.g., T cells or NK cells) are able to replicate in vivo resulting in long-term persistence that can lead to sustained tumor control. In various aspects, the cells administered to the patient, or their progeny, persist in the patient for at least four months, five months, six months, seven months, eight months, nine months, ten months, eleven months, twelve months, thirteen months, fourteen month, fifteen months, sixteen months, seventeen months, eighteen months, nineteen months, twenty months, twenty-one months, twenty-two months, twenty-three months, two years, three years, four years, or five years after administration of the cell to the patient.

[0447] The disclosure also includes a type of cellular therapy where cells (e.g., T cells, NK cells) are modified, e.g., by in vitro transcribed RNA, to transiently express a chimeric antigen receptor (CAR) and the CAR-expressing cell (e.g., T cell, NK cell) is infused to a recipient in need thereof. The infused cell is able to kill tumor cells in the recipient. Thus, in various aspects, the cells administered to the patient, are present for less than one month, e.g., three weeks, two weeks, one week, after administration of the cell (e.g., T cell, NK cell) to the patient.

[0448] Without wishing to be bound by any particular theory, the anti-tumor immunity response elicited by the CAR-modified cells (e.g., T cells, NK cells) may be an active or a passive immune response, or alternatively may be due to a direct vs indirect immune response. In one aspect, the CAR transduced T cells exhibit specific proinflammatory cytokine secretion and potent cytolytic activity in response to human cancer cells expressing the CD19, resist soluble CD19 inhibition, mediate bystander killing and mediate regression of an established human tumor. For example, antigen-less tumor cells within a heterogeneous field of CD19-expressing tumor may be susceptible to indirect destruction by CD19-redirected T cells that has previously reacted against adjacent antigen-positive cancer cells.

[0449] In one aspect, the fully-human CAR-modified cells (e.g., T cells, NK cells) described herein may be a type of vaccine for ex vivo immunization and/or in vivo therapy in a mammal. In one aspect, the mammal is a human.

[0450] With respect to ex vivo immunization, at least one of the following occurs in vitro prior to administering the cell into a subject: i) expansion of the cells, ii) introducing a nucleic acid encoding a CAR to the cells or iii) cryopreservation of the cells.

[0451] Ex vivo procedures are well known in the art and are discussed more fully below. Briefly, cells are isolated from a subject (e.g., a human) and genetically modified (i.e., transduced or transfected in vitro) with a vector expressing a CAR disclosed herein. The CAR-modified cell can be administered to a mammalian recipient to provide a therapeutic benefit. The mammalian recipient may be a human and the CAR-modified cell can be autologous with respect to the recipient. Alternatively, the cells can be allogeneic, syngeneic or xenogeneic with respect to the recipient.

### Combination Therapy

[0452] It will be appreciated that any cancer therapy as described above and herein, can be administered in combination with one or more additional therapies to treat and/or reduce the symptoms of cancer described herein. The pharmaceutical compositions can be administered concurrently with, prior to, or subsequent to, one or more other additional therapies or therapeutic agents. In an embodiment, a CAR-expressing cell described herein may be used in combination with other known agents and therapies. Administered “in combination”, as used herein, means that two (or more) different treatments are delivered to the subject during the course of the subject's affliction with the disorder, e.g., the two or more treatments are delivered after the subject has been diagnosed with the disorder and before the disorder has been cured or eliminated or treatment has ceased for other reasons. In some embodiments, the delivery of one treatment is still occurring when the delivery of the second begins, so that there is overlap in terms of administration. This is sometimes referred to herein as “simultaneous” or “concurrent delivery”. In other embodiments, the delivery of one treatment ends before the delivery of the other treatment begins. In some embodiments of either case, the treatment is more effective because of combined administration. For example, the second treatment is more effective, e.g., an equivalent effect is seen with less of the second treatment, or the second treatment reduces symptoms to a greater extent, than would be seen if the second treatment were administered in the absence of the first treatment or the analogous situation is seen with the first treatment. In some embodiments, delivery is such that the reduction in a symptom, or other parameter related to the disorder is greater than what would be observed with one treatment delivered in the absence of the other. The effect of the two treatments can be partially additive, wholly additive, or greater than additive. The delivery can be such that an effect of the first treatment delivered is still detectable when the second is delivered.

[0453] A CAR-expressing cell described herein and the at least one additional therapeutic agent can be administered simultaneously, in the same or in separate compositions, or sequentially. For sequential administration, the CAR-expressing cell described herein can be administered first, and the additional agent can be administered second, or the order of administration can be reversed.

[0454] The CAR therapy and/or other therapeutic agents, procedures or modalities can be administered during periods of active disorder, or during a period of remission or less active disease. The CAR therapy can be administered before the other treatment, concurrently with the treatment, post-treatment, or during remission of the disorder.

[0455] When administered in combination, the CAR therapy and the additional agent (e.g., second or third agent), or all, can be administered in an amount or dose that is higher, lower or the same than the amount or dosage of each agent used individually, e.g., as a monotherapy. In certain embodiments, the administered amount or dosage of the CAR therapy, the additional agent (e.g., second or third agent), or all, is lower (e.g., at least 20%, at least 30%, at least 40%, or at least 50%) than the amount or dosage of each agent used individually, e.g., as a monotherapy. In other embodiments, the amount or dosage of the CAR therapy, the additional agent (e.g., second or third agent), or all, that results in a desired effect (e.g., treatment of cancer) is lower (e.g., at least 20%, at least 30%, at least 40%, or at least 50% lower) than the amount or dosage of each agent used individually, e.g., as a monotherapy, required to achieve the same therapeutic effect.

[0456] In further aspects, a CAR-expressing cell described herein may be used in a treatment regimen in combination with surgery, chemotherapy, radiation, immunosuppressive agents, such as cyclosporin, azathioprine, methotrexate, mycophenolate, and FK506, antibodies, or other immunoablative agents such as CAMPATH, anti-CD3 antibodies or other antibody therapies, cytoxin, fludarabine, cyclosporin, FK506, rapamycin, mycophenolic acid, steroids, FR901228, cytokines, and irradiation peptide vaccine, such as that described in Izumoto et al. 2008 J NEUROSURG 108:963-971.

[0457] In one embodiment, a CAR-expressing cell described herein can be used in combination with a chemotherapeutic agent. Exemplary chemotherapeutic agents include those described in paragraphs 873-874 of International Application WO2015/142675, filed Mar. 13, 2015, which is herein incorporated by reference in its entirety, and combinations thereof.

[0458] Exemplary alkylating agents include, without limitation, those described in paragraph 875 of International Application WO2015/142675, filed Mar. 13, 2015, which is herein incorporated by reference in its entirety, and combinations thereof.

[0459] Exemplary mTOR inhibitors include, without limitation, RAD001, temsirolimus; ridaforolimus (formally known as deferolimus, (1R,2R,4S)-4-[(2R)-2 [(1R,9S,12S,15R,16E,18R,19R,21R,23S,24E,26E,28Z,30S,32S,35R)-1,18-dihydroxy-19,30-dimethoxy- 15,17,21,23, 29,35-hexamethyl-2,3,10,14,20-pentaoxo-11,36-dioxa-4-azatricyclo[30.3.1.0^{4,9}]hexatriaconta-16,24,26,28-tetraen-12-yl[propyl]-2-methoxycyclohexyl dimethylphosphinate, also known as AP23573 and MK8669, and described in PCT Publication No. WO 03/064383); everolimus (Afinitor® or RAD001); rapamycin (AY22989, Sirolimus®); simapimod (CAS 164301-51-3); emsirolimus, (5-{2,4-Bis[(3S)-3-methylmorpholin-4-yl]pyrido[2,3-d]pyrimidin-7-yl}-2-methoxyphenyl)methanol (AZD8055); 2-Amino-8-[trans-4-(2-hydroxyethoxy)cyclohexyl]-6-(6-methoxy-3-pyridinyl)-4-methyl-pyrido[2,3-d]pyrimidin-7(8H)-one (PF04691502, CAS 1013101-36-4); and N²-[1,4-dioxo-4-[[4-(4-oxo-8-phenyl-4H-1-benzopyran-2-yl)morpholinium-4-yl[methoxy]butyl]-L-arginylglycyl-L-α-aspartylL-serine-(SEQ ID NO: 1204), inner salt (SF1126, CAS 936487-67-1), XL765 and combinations thereof.

[0460] Exemplary immunomodulators include, without limitation, those described in paragraph 882 of International Application WO2015/142675, filed Mar. 13, 2015, which is herein incorporated by reference in its entirety, and combinations thereof.

[0461] Exemplary anthracyclines include, without limitation, those described in paragraph 883 of International Application WO2015/142675, filed Mar. 13, 2015, which is herein incorporated by reference in its entirety, and combinations thereof.

[0462] Exemplary vinca alkaloids include, without limitation, those described in paragraph 884 of International Application WO2015/142675, filed Mar. 13, 2015, which is herein incorporated by reference in its entirety, and combinations thereof.

[0463] Exemplary proteosome inhibitors include, without limitation, those described in paragraph 884 of International Application WO2015/142675, filed Mar. 13, 2015, which is herein incorporated by reference in its entirety, and combinations thereof.

[0464] In some embodiments, a CAR-expressing cell described herein is administered in combination with an oncolytic virus. In embodiments, oncolytic viruses are capable of selectively replicating in and triggering the death of or slowing the growth of a cancer cell. In some cases, oncolytic viruses have no effect or a minimal effect on non-cancer cells. An oncolytic virus includes but is not limited to an oncolytic adenovirus, oncolytic Herpes Simplex Viruses, oncolytic retrovirus, oncolytic parvovirus, oncolytic vaccinia virus, oncolytic Sinbis virus, oncolytic influenza virus, or oncolytic RNA virus (e.g., oncolytic reovirus, oncolytic Newcastle Disease Virus (NDV), oncolytic measles virus, or oncolytic vesicular stomatitis virus (VSV)).

[0465] In an embodiment, cells expressing a CAR described herein are administered to a subject in combination with a molecule that decreases the Treg cell population. Methods that decrease the number of (e.g., deplete) Treg cells are known in the art and include, e.g., CD25 depletion, cyclophosphamide administration, modulating GITR function. Without wishing to be bound by theory, it is believed that reducing the number of Treg cells in a subject prior to apheresis or prior to administration of a CAR-expressing cell described herein reduces the number of unwanted immune cells (e.g., Tregs) in the tumor microenvironment and reduces the subject's risk of relapse.

[0466] In one embodiment, a CAR expressing cell described herein are administered to a subject in combination with a molecule targeting GITR and/or modulating GITR functions, such as a GITR agonist and/or a GITR antibody that depletes regulatory T cells (Tregs). In embodiments, cells expressing a CAR described herein are administered to a subject in combination with cyclophosphamide. In one embodiment, the GITR binding molecules and/or molecules modulating GITR functions (e.g., GITR agonist and/or Treg depleting GITR antibodies) are administered prior to administration of the CAR-expressing cell. For example, in one embodiment, the GITR agonist can be administered prior to apheresis of the cells. In embodiments, cyclophosphamide is administered to the subject prior to administration (e.g., infusion or re-infusion) of the CAR-expressing cell or prior to apheresis of the cells. In embodiments, cyclophosphamide and an anti-GITR antibody are administered to the subject prior to administration (e.g., infusion or re-infusion) of the CAR-expressing cell or prior to apheresis of the cells. In one embodiment, the subject has cancer (e.g., a solid cancer or a hematological cancer such as ALL or CLL). In an embodiment, the subject has CLL. In embodiments, the subject has ALL. In embodiments, the subject has a solid cancer, e.g., a solid cancer described herein. Exemplary GITR agonists include, without limitation, GITR fusion proteins and anti-GITR antibodies (e.g., bivalent anti-GITR antibodies) such as, e.g., a GITR fusion protein described in U.S. Pat. No.: 6,111,090, European Patent No.: 090505B1, U.S Pat. No.: 8,586,023, PCT Publication Nos.: WO 2010/003118 and 2011/090754, or an anti-GITR antibody described, e.g., in U.S. Pat. No.: 7,025,962, European Patent No.: 1947183B1, U.S. Pat. No.: 7,812,135, U.S. Pat. No.: 8,388,967, U.S. Pat. No.: 8,591,886, European Patent No.: EP 1866339, PCT Publication No.: WO 2011/028683, PCT Publication No.:WO 2013/039954, PCT Publication No.: WO2005/007190, PCT Publication No.: WO 2007/133822, PCT Publication No.: WO2005/055808, PCT Publication No.: WO 99/40196, PCT Publication No.: WO 2001/03720, PCT Publication No.: WO99/20758, PCT Publication No.: WO2006/083289, PCT Publication No.: WO 2005/115451, U.S. Pat. No.: 7,618,632, and PCT Publication No.: WO 2011/051726.

[0467] In an embodiment, a CAR expressing cell described herein, such as, e.g., a CD19 CAR-expressing cell (e.g., T cell, NK cell), e.g., CTL019, is administered to a subject, in combination with a GITR agonist, e.g., a GITR agonist described herein. In an embodiment, the GITR agonist is administered prior to the CAR-expressing cell. For example, in an embodiment, the GITR agonist can be administered prior to apheresis of the cells. In an embodiment, the subject has cancer (e.g., a hematological cancer such as ALL and CLL). In an embodiment, the subject has ALL. In an embodiment, the subject has CLL.

[0468] In an embodiment, a CAR expressing cell described herein, such as, e.g., a CD19 CAR-expressing cell (e.g., T cell, NK cell), e.g., CTL019 is administered to a subject, in combination with an mTOR inhibitor, e.g., an mTOR inhibitor described herein, e.g., a target of the rapamycin signaling pathway such as RAD001. In an embodiment, the mTOR inhibitor is administered prior to the CAR-expressing cell. For example, in an embodiment, the mTOR inhibitor can be administered prior to apheresis of the cells. In an embodiment, the subject has cancer (e.g., a hematological cancer such as ALL and CLL). In an embodiment, the subject has ALL. In an embodiment, the subject has CLL.

### Kinase Inhibitor

[0469] In one embodiment, a CAR-expressing cell described herein may be used in a treatment regimen in combination with a kinase inhibitor, e.g., a CDK4 inhibitor, a BTK inhibitor, an MNK inhibitor, an mTOR inhibitor, an ITK inhibitor, etc. In an embodiment, the kinase inhibitor is a CDK4 inhibitor, e.g., a CDK4 inhibitor described herein, e.g., a CDK4/6 inhibitor, such as, e.g., 6-Acetyl-8-cyclopentyl-5-methyl-2-(5-piperazin-1-yl-pyridin-2-ylamino)-8H-pyrido[2,3-d]pyrimidin-7-one, hydrochloride (also referred to as palbociclib or PD0332991). In one embodiment, the kinase inhibitor is a BTK inhibitor, e.g., a BTK inhibitor described herein, such as, e.g., ibrutinib. In one embodiment, the kinase inhibitor is an mTOR inhibitor, e.g., an mTOR inhibitor described herein, such as, e.g., rapamycin, a rapamycin analog, OSI-027. The mTOR inhibitor can be, e.g., an mTORC1 inhibitor and/or an mTORC2 inhibitor, e.g., an mTORC1 inhibitor and/or mTORC2 inhibitor described herein. In one embodiment, the kinase inhibitor is a MNK inhibitor, e.g., a MNK inhibitor described herein, such as, e.g., 4-amino-5-(4-fluoroanilino)-pyrazolo [3,4-d] pyrimidine. The MNK inhibitor can be, e.g., a MNK1a, MNK1b, MNK2a and/or MNK2b inhibitor.

[0470] In one embodiment, the kinase inhibitor is a CDK4 inhibitor selected from aloisine A; flavopiridol or HMR-1275, 2-(2-chlorophenyl)-5,7-dihydroxy-8-[(3S,4R)-3-hydroxy-1-methyl-4-piperidinyl]-4-chromenone; crizotinib (PF-02341066; 2-(2-Chlorophenyl)-5,7-dihydroxy-8-[(2R,3S)-2-(hydroxymethyl)-1-methyl-3-pyrrolidinyl]-4H-1-benzopyran-4-one, hydrochloride (P276-00); 1-methyl-5-[[2-[5-(trifluoromethyl)-1H-imidazol-2-yl]-4-pyridinyl]oxy]-N-[4-(trifluoromethyl)phenyl]-1H-benzimidazol-2-amine (RAF265); indisulam (E7070); roscovitine (CYC202); palbociclib (PD0332991); dinaciclib (SCH727965); N-[5-[[(5-tert-butyloxazol-2-yl)methyl]thio]thiazol-2-yl]piperidine-4-carboxamide (BMS 387032); 4-[[9-chloro-7-(2,6-difluorophenyl)-5H-pyrimido[5,4-d][2]benzazepin-2-yl]amino]-benzoic acid (MLN8054); 5-[3-(4,6-difluoro-1H-benzimidazol-2-yl)-1H-indazol-5-yl]-N-ethyl-4-methyl-3-pyridinemethanamine (AG-024322); 4-(2,6-dichlorobenzoylamino)-1H-pyrazole-3-carboxylic acid N-(piperidin-4-yl)amide (AT7519); 4-[2-methyl-1-(1-methylethyl)-1H-imidazol-5-yl]-N-[4-(methylsulfonyl)phenyl]-2-pyrimidinamine (AZD5438); and XL281 (BMS908662).

[0471] In one embodiment, the kinase inhibitor is a CDK4 inhibitor, e.g., palbociclib (PD0332991), and the palbociclib is administered at a dose of about 50 mg, 60 mg, 70 mg, 75 mg, 80 mg, 90 mg, 100 mg, 105 mg, 110 mg, 115 mg, 120 mg, 125 mg, 130 mg, 135 mg (e.g., 75 mg, 100 mg or 125 mg) daily for a period of time, e.g., daily for 14-21 days of a 28 day cycle, or daily for 7-12 days of a 21 day cycle. In one embodiment, 1, 2, 3, 4, 5, 6, 7, 8, 9, 10, 11, 12 or more cycles of palbociclib are administered.

[0472] In one embodiment, the kinase inhibitor is a BTK inhibitor selected from ibrutinib (PCI-32765); GDC-0834; RN-486; CGI-560; CGI-1764; HM-71224; CC-292; ONO-4059; CNX-774; and LFM-A13.

[0473] In one embodiment, the kinase inhibitor is a BTK inhibitor, e.g., ibrutinib (PCI-32765), and the ibrutinib is administered at a dose of about 250 mg, 300 mg, 350 mg, 400 mg, 420 mg, 440 mg, 460 mg, 480 mg, 500 mg, 520 mg, 540 mg, 560 mg, 580 mg, 600 mg (e.g., 250 mg, 420 mg or 560 mg) daily for a period of time, e.g., daily for 21 day cycle, or daily for 28 day cycle. In one embodiment, 1, 2, 3, 4, 5, 6, 7, 8, 9, 10, 11, 12 or more cycles of ibrutinib are administered.

[0474] In one embodiment, the kinase inhibitor is an mTOR inhibitor selected from temsirolimus; ridaforolimus (1R,2R,4S)-4-[(2R)-2 [(1R,9S,12S,15R,16E,18R,19R,21R,23S,24E,26E,28Z,30S,32S,35R)-1,18-dihydroxy-19,30-dimethoxy-15,17,21,23, 29,35-hexamethyl-2,3,10,14,20-pentaoxo-11,36-dioxa-4-azatricyclo[30.3.1.0^{4,9}] hexatriaconta-16,24,26,28-tetraen-12-yl]propyl]-2-methoxycyclohexyl dimethylphosphinate, also known as AP23573 and MK8669; everolimus (RAD001); rapamycin (AY22989); simapimod; (5-{2,4-bis[(3S)-3-methylmorpholin-4-yl]pyrido[2,3-d]pyrimidin-7-yl}-2-methoxyphenyl)methanol (AZD8055); 2-mmino-8-[trans-4-(2-hydroxyethoxy)cyclohexyl]-6-(6-methoxy-3-pyridinyl)-4-methyl-pyrido[2,3-d]pyrimidin-7(8H)-one (PF04691502); and N²-[1,4-dioxo-4-[[4-(4-oxo-8-phenyl-4H-1-benzopyran-2-yl)morpholinium-4-yl]methoxy]butyl]-L-arginylglycyl-L-α-aspartylL-serine-(SEQ ID NO: 1204), inner salt (SF1126); and XL765.

[0475] In one embodiment, the kinase inhibitor is an mTOR inhibitor, e.g., rapamycin, and the rapamycin is administered at a dose of about 3 mg, 4 mg, 5 mg, 6 mg, 7 mg, 8 mg, 9 mg, 10 mg (e.g., 6 mg) daily for a period of time, e.g., daily for 21 day cycle, or daily for 28 day cycle. In one embodiment, 1, 2, 3, 4, 5, 6, 7, 8, 9, 10, 11, 12 or more cycles of rapamycin are administered. In one embodiment, the kinase inhibitor is an mTOR inhibitor, e.g., everolimus and the everolimus is administered at a dose of about 2 mg, 2.5 mg, 3 mg, 4 mg, 5 mg, 6 mg, 7 mg, 8 mg, 9 mg, 10 mg, 11 mg, 12 mg, 13 mg, 14 mg, 15 mg (e.g., 10 mg) daily for a period of time, e.g., daily for 28 day cycle. In one embodiment, 1, 2, 3, 4, 5, 6, 7, 8, 9, 10, 11, 12 or more cycles of everolimus are administered.

[0476] In one embodiment, the kinase inhibitor is an MNK inhibitor selected from CGP052088; 4-amino-3-(p-fluorophenylamino)-pyrazolo [3,4-d] pyrimidine (CGP57380); cercosporamide; ETC-1780445-2; and 4-amino-5-(4-fluoroanilino)-pyrazolo [3,4-d] pyrimidine.

[0477] In some embodiments of the methods, uses, and compositions herein, the BTK inhibitor is a BTK inhibitor described in International Application WO/2015/079417, which is herein incorporated by reference in its entirety. For instance, in some embodiments, the BTK inhibitor is a compound of formula (I) or a pharmaceutically acceptable salt thereof;

[chemical structure]

[0478] wherein,

[0479] R1 is hydrogen, C1-C6 alkyl optionally substituted by hydroxy;

[0480] R2 is hydrogen or halogen;

[0481] R3 is hydrogen or halogen;

[0482] R4 is hydrogen;

[0483] R5 is hydrogen or halogen;

[0484] or R4 and R5 are attached to each other and stand for a bond, —CH2-, —CH2-CH2- , —CH═CH—, —CH═CH—CH2-; —CH2-CH═CH—; or —CH2-CH2-CH2-;

[0485] R6 and R7 stand independently from each other for H, C1-C6 alkyl optionally substituted by hydroxyl, C3-C6 cycloalkyl optionally substituted by halogen or hydroxy, or halogen;

[0486] R8, R9, R, R′, R10 and R11 independently from each other stand for H, or C1-C6 alkyl optionally substituted by C1-C6 alkoxy; or any two of R8, R9, R, R′, R10 and R11 together with the carbon atom to which they are bound may form a 3-6 membered saturated carbocyclic ring;

[0487] R12 is hydrogen or C1-C6 alkyl optionally substituted by halogen or C1-C6 alkoxy;

[0488] or R12 and any one of R8, R9, R, R′, R10 or R11 together with the atoms to which they are bound may form a 4, 5, 6 or 7 membered azacyclic ring, which ring may optionally be substituted by halogen, cyano, hydroxyl, C1-C6 alkyl or C1-C6 alkoxy;

[0489] n is 0 or 1; and

[0490] R13 is C2-C6 alkenyl optionally substituted by C1-C6 alkyl, C1-C6 alkoxy or N,N-di-C1-C6 alkyl amino; C2-C6 alkynyl optionally substituted by C1-C6 alkyl or C1-C6 alkoxy; or C2-C6 alkylenyl oxide optionally substituted by C1-C6 alkyl.

Low, Immune Enhancing, Dose of an mTOR Inhibitor

[0491] Methods described herein can use a low, immune enhancing, dose of an mTOR inhibitor e.g., an allosteric mTOR inhibitor, including rapalogs such as RAD001. Administration of a low, immune enhancing, dose of an mTOR inhibitor (e.g., a dose that is insufficient to completely suppress the immune system, but sufficient to improve immune function) can optimize the performance of immune effector cells, e.g., T cells or CAR-expressing cells, in the subject. Methods for measuring mTOR inhibition, dosages, treatment regimens, and suitable pharmaceutical compositions are described in U.S. Patent Application No. 2015/0140036, filed Nov. 13, 2014, hereby incorporated by reference.

[0492] In an embodiment, administration of a low, immune enhancing, dose of an mTOR inhibitor can result in one or more of the following:
[0493] i) a decrease in the number of PD-1 positive immune effector cells;
[0494] ii) an increase in the number of PD-1 negative immune effector cells;
[0495] iii) an increase in the ratio of PD-1 negative immune effector cells/PD-1 positive immune effector cells;
[0496] iv) an increase in the number of naive T cells;
[0497] v) an increase in the expression of one or more of the following markers: CD62L^{high}, CD127^{high}, CD27⁺, and BCL2, e.g., on memory T cells, e.g., memory T cell precursors; vi) a decrease in the expression of KLRG1, e.g., on memory T cells, e.g., memory T cell precursors; or
[0498] vii) an increase in the number of memory T cell precursors, e.g., cells with any one or combination of the following characteristics: increased CD62L^{high}, increased CD127^{high}, increased CD27⁺, decreased KLRG1, and increased BCL2;
   and wherein any of the foregoing, e.g., i), ii), iii), iv), v), vi), or vii), occurs e.g., at least transiently, e.g., as compared to a non-treated subject.

[0499] In another embodiment, administration of a low, immune enhancing, dose of an mTOR inhibitor results in increased or prolonged proliferation of CAR-expressing cells, e.g., in culture or in a subject, e.g., as compared to non-treated CAR-expressing cells or a non-treated subject. In embodiments, increased proliferation is associated with in an increase in the number of CAR-expressing cells. In another embodiment, administration of a low, immune enhancing, dose of an mTOR inhibitor results in increased killing of cancer cells by CAR-expressing cells, e.g., in culture or in a subject, e.g., as compared to non-treated CAR-expressing cells or a non-treated subject. In embodiments, increased killing of cancer cells is associated with in a decrease in tumor volume.

[0500] In one embodiment, the cells expressing a CAR molecule, e.g., a CAR molecule described herein, are administered in combination with a low, immune enhancing dose of an mTOR inhibitor, e.g., an allosteric mTOR inhibitor, e.g., RAD001, or a catalytic mTOR inhibitor. For example, administration of the low, immune enhancing, dose of the mTOR inhibitor can be initiated prior to administration of a CAR-expressing cell described herein; completed prior to administration of a CAR-expressing cell described herein; initiated at the same time as administration of a CAR-expressing cell described herein; overlapping with administration of a CAR-expressing cell described herein; or continuing after administration of a CAR-expressing cell described herein.

[0501] Alternatively or in addition, administration of a low, immune enhancing, dose of an mTOR inhibitor can optimize immune effector cells to be engineered to express a CAR molecule described herein. In such embodiments, administration of a low, immune enhancing, dose of an mTOR inhibitor, e.g., an allosteric inhibitor, e.g., RAD001, or a catalytic inhibitor, is initiated or completed prior to harvest of immune effector cells, e.g., T cells or NK cells, to be engineered to express a CAR molecule described herein, from a subject.

[0502] In another embodiment, immune effector cells, e.g., T cells or NK cells, to be engineered to express a CAR molecule described herein, e.g., after harvest from a subject, or CAR-expressing immune effector cells, e.g., T cells or NK cells, e.g., prior to administration to a subject, can be cultured in the presence of a low, immune enhancing, dose of an mTOR inhibitor.

[0503] In an embodiment, administering to the subject a low, immune enhancing, dose of an mTOR inhibitor comprises administering, e.g., once per week, e.g., in an immediate release dosage form, 0.1 to 20, 0.5 to 10, 2.5 to 7.5, 3 to 6, or about 5, mgs of RAD001, or a bioequivalent dose thereof. In an embodiment, administering to the subject a low, immune enhancing, dose of an mTOR inhibitor comprises administering, e.g., once per week, e.g., in a sustained release dosage form, 0.3 to 60, 1.5 to 30, 7.5 to 22.5, 9 to 18, or about 15 mgs of RAD001, or a bioequivalent dose thereof.

[0504] In an embodiment, a dose of an mTOR inhibitor is associated with, or provides, mTOR inhibition of at least 5 but no more than 90%, at least 10 but no more than 90%, at least 15, but no more than 90%, at least 20 but no more than 90%, at least 30 but no more than 90%, at least 40 but no more than 90%, at least 50 but no more than 90%, at least 60 but no more than 90%, at least 70 but no more than 90%, at least 5 but no more than 80%, at least 10 but no more than 80%, at least 15, but no more than 80%, at least 20 but no more than 80%, at least 30 but no more than 80%, at least 40 but no more than 80%, at least 50 but no more than 80%, at least 60 but no more than 80%, at least 5 but no more than 70%, at least 10 but no more than 70%, at least 15, but no more than 70%, at least 20 but no more than 70%, at least 30 but no more than 70%, at least 40 but no more than 70%, at least 50 but no more than 70%, at least 5 but no more than 60%, at least 10 but no more than 60%, at least 15, but no more than 60%, at least 20 but no more than 60%, at least 30 but no more than 60%, at least 40 but no more than 60%, at least 5 but no more than 50%, at least 10 but no more than 50%, at least 15, but no more than 50%, at least 20 but no more than 50%, at least 30 but no more than 50%, at least 40 but no more than 50%, at least 5 but no more than 40%, at least 10 but no more than 40%, at least 15, but no more than 40%, at least 20 but no more than 40%, at least 30 but no more than 40%, at least 35 but no more than 40%, at least 5 but no more than 30%, at least 10 but no more than 30%, at least 15, but no more than 30%, at least 20 but no more than 30%, or at least 25 but no more than 30%.

[0505] The extent of mTOR inhibition can be conveyed as, or corresponds to, the extent of P70 S6 kinase inhibition, e.g., the extent of mTOR inhibition can be determined by the level of decrease in P70 S6 kinase activity, e.g., by the decrease in phosphorylation of a P70 S6 kinase substrate. The level of mTOR inhibition can be evaluated by various methods, such as measuring P70 S6 kinase activity by the Boulay assay, as described in U.S. Patent Application No. 2015/01240036, hereby incorporated by reference, or as described in U.S. Pat. No. 7,727,950, hereby incorporated by reference; measuring the level of phosphorylated S6 by western blot; or evaluating a change in the ratio of PD1 negative immune effector cells to PD1 positive immune effector cells.

[0506] As used herein, the term “mTOR inhibitor” refers to a compound or ligand, or a pharmaceutically acceptable salt thereof, which inhibits the mTOR kinase in a cell. In an embodiment, an mTOR inhibitor is an allosteric inhibitor. Allosteric mTOR inhibitors include the neutral tricyclic compound rapamycin (sirolimus), rapamycin-related compounds, that is compounds having structural and functional similarity to rapamycin including, e.g., rapamycin derivatives, rapamycin analogs (also referred to as rapalogs) and other macrolide compounds that inhibit mTOR activity. In an embodiment, an mTOR inhibitor is a catalytic inhibitor.

[0507] Rapamycin is a known macrolide antibiotic produced by Streptomyces hygroscopicus having the structure shown in Formula A.

[chemical structure]

[0508] See, e.g., McAlpine, J. B., et al., J. Antibiotics (1991) 44: 688; Schreiber, S. L., et al., J. Am. Chem. Soc. (1991) 113: 7433; U.S. Pat. No. 3,929,992. There are various numbering schemes proposed for rapamycin. To avoid confusion, when specific rapamycin analogs are named herein, the names are given with reference to rapamycin using the numbering scheme of formula A.

[0509] Rapamycin analogs useful in the invention are, for example, O-substituted analogs in which the hydroxyl group on the cyclohexyl ring of rapamycin is replaced by OR₁ in which R₁ is hydroxyalkyl, hydroxyalkoxyalkyl, acylaminoalkyl, or aminoalkyl; e.g. RAD001, also known as, everolimus as described in U.S. Pat. No. 5,665,772 and WO94/09010 the contents of which are incorporated by reference. Other suitable rapamycin analogs include those substituted at the 26- or 28-position. The rapamycin analog may be an epimer of an analog mentioned above, particularly an epimer of an analog substituted in position 40, 28 or 26, and may optionally be further hydrogenated, e.g. as described in U.S. Pat. No. 6,015,815, WO95/14023 and WO99/15530 the contents of which are incorporated by reference, e.g. ABT578 also known as zotarolimus or a rapamycin analog described in U.S. Pat. No. 7,091,213, WO98/02441 and WO01/14387 the contents of which are incorporated by reference, e.g. AP23573 also known as ridaforolimus.

[0510] Examples of rapamycin analogs suitable for use in the present invention from U.S. Pat. No. 5,665,772 include, but are not limited to, 40-O-benzyl-rapamycin, 40-O-(4′-hydroxymethyl)benzyl-rapamycin, 40-O-[4′-(1,2-dihydroxyethyl)]benzyl-rapamycin, 40-O-allyl-rapamycin, 40-O-[3′-(2,2-dimethyl-1,3-dioxolan-4(S)-yl)-prop-2′-en-1′-yl]-rapamycin, (2′E,4′S)-40-O-(4′,5′-dihydroxypent-2′-en-1′-yl)-rapamycin, 40-O-(2-hydroxy)ethoxycarbonylmethyl-rapamycin, 40-O-(2-hydroxy)ethyl-rapamycin, 40-O-(3-hydroxy)propyl-rapamycin, 40-O-(6-hydroxy)hexyl-rapamycin, 40-O-[2-(2-hydroxy)ethoxy]ethyl-rapamycin, 40-O-[(3S)-2,2-dimethyldioxolan-3-yl]methyl-rapamycin, 40-O-[(2S)-2,3-dihydroxyprop-1-yl]-rapamycin, 40-O-(2-acetoxy)ethyl-rapamycin, 40-O-(2-nicotinoyloxy)ethyl-rapamycin, 40-O-[2-(N-morpholino)acetoxylethyl-rapamycin, 40-O-(2-N-imidazolylacetoxy)ethyl-rapamycin, 40-O-[2-(N-methyl-N′-piperazinyl)acetoxy]ethyl-rapamycin, 39-O-desmethyl-39,40-O,O-ethylene-rapamycin, (26R)-26-dihydro-40-O-(2-hydroxy)ethyl-rapamycin, 40-O-(2-aminoethyl)-rapamycin, 40-O-(2-acetaminoethyl)-rapamycin, 40-O-(2-nicotinamidoethyl)-rapamycin, 40-O-(2-(N-methyl-imidazo-2′-ylcarbethoxamido)ethyl)-rapamycin, 40-O-(2-ethoxycarbonylaminoethyl)-rapamycin, 40-O-(2-tolylsulfonamidoethyl)-rapamycin and 40-O-[2-(4′,5′-dicarboethoxy-1′,2′,3′-triazol-1′-yl)-ethyl]-rapamycin.

[0511] Other rapamycin analogs useful in the present invention are analogs where the hydroxyl group on the cyclohexyl ring of rapamycin and/or the hydroxy group at the 28 position is replaced with an hydroxyester group are known, for example, rapamycin analogs found in US RE44,768, e.g. temsirolimus.

[0512] Other rapamycin analogs useful in the preset invention include those wherein the methoxy group at the 16 position is replaced with another substituent, preferably (optionally hydroxy-substituted) alkynyloxy, benzyl, orthomethoxybenzyl or chlorobenzyl and/or wherein the mexthoxy group at the 39 position is deleted together with the 39 carbon so that the cyclohexyl ring of rapamycin becomes a cyclopentyl ring lacking the 39 position methyoxy group; e.g. as described in WO95/16691 and WO96/41807 the contents of which are incorporated by reference. The analogs can be further modified such that the hydroxy at the 40-position of rapamycin is alkylated and/or the 32-carbonyl is reduced.

[0513] Rapamycin analogs from WO95/16691 include, but are not limited to, 16-demthoxy-16-(pent-2-ynyl)oxy-rapamycin, 16-demthoxy-16-(but-2-ynyl)oxy-rapamycin, 16-demthoxy-16-(propargyl)oxy-rapamycin, 16-demethoxy-16-(4-hydroxy-but-2-ynyl)oxy-rapamycin, 16-demthoxy-16-benzyloxy-40-O-(2-hydroxyethyl)-rapamycin, 16-demthoxy-16-benzyloxy-rapamycin, 16-demethoxy-16-ortho-methoxybenzyl-rapamycin, 16-demethoxy-40-O-(2-methoxyethyl)-16-pent-2-ynyl)oxy-rapamycin, 39-demethoxy-40-desoxy-39-formyl-42-nor-rapamycin, 39-demethoxy-40-desoxy-39-hydroxymethyl-42-nor-rapamycin, 39-demethoxy-40-desoxy-39-carboxy-42-nor-rapamycin, 39-demethoxy-40-desoxy-39-(4-methyl-piperazin-1-yl)carbonyl-42-nor-rapamycin, 39-demethoxy-40-desoxy-39-(morpholin-4-yl)carbonyl-42-nor-rapamycin, 39-demethoxy-40-desoxy-39-[N-methyl, N-(2-pyridin-2-yl-ethyl)] carbamoyl-42-nor-rapamycin and 39-demethoxy-40-desoxy-39-(p-toluenesulfonylhydrazonomethyl)-42-nor-rapamycin.

[0514] Rapamycin analogs from WO96/41807 include, but are not limited to, 32-deoxo-rapamycin, 16-O-pent-2-ynyl-32-deoxo-rapamycin, 16-O-pent-2-ynyl-32-deoxo-40-O-(2-hydroxy-ethyl)-rapamycin, 16-O-pent-2-ynyl-32-(S)-dihydro-40-O-(2-hydroxyethyl)-rapamycin, 32(S)-dihydro-40-O-(2-methoxy)ethyl-rapamycin and 32(S)-dihydro-40-O-(2-hydroxyethyl)-rapamycin.

[0515] Another suitable rapamycin analog is umirolimus as described in US2005/0101624 the contents of which are incorporated by reference.

[0516] RAD001, otherwise known as everolimus (Afinitor®), has the chemical name (1R,9S,12S,15R,16E,18R,19R,21R,23S,24E,26E,28E,30S,32S,35R)-1,18-dihydroxy-12-{(1R)- 2-[(1S,3R,4R)-4-(2-hydroxyethoxy)-3-methoxycyclohexyl]-1-methylethyl}-19,30-dimethoxy-15,17,21,23,29,35-hexamethyl-11,36-dioxa-4-aza-tricyclo[30.3.1.04,9]hexatriaconta-16,24,26,28-tetraene-2,3,10,14,20-pentaone

[0517] Further examples of allosteric mTOR inhibitors include sirolimus (rapamycin, AY-22989), 40-[3-hydroxy-2-(hydroxymethyl)-2-methylpropanoate]-rapamycin (also called temsirolimus or CCI-779) and ridaforolimus (AP-23573/MK-8669). Other examples of allosteric mTor inhibtors include zotarolimus (ABT578) and umirolimus.

[0518] Alternatively or additionally, catalytic, ATP-competitive mTOR inhibitors have been found to target the mTOR kinase domain directly and target both mTORC1 and mTORC2. These are also more effective inhibitors of mTORC1 than such allosteric mTOR inhibitors as rapamycin, because they modulate rapamycin-resistant mTORC1 outputs such as 4EBP1-T37/46 phosphorylation and cap-dependent translation.

[0519] Catalytic inhibitors include: BEZ235 or 2-methyl-2-[4-(3-methyl-2-oxo-8-quinolin-3-yl-2,3-dihydro-imidazo[4,5-c]quinolin-1-yl)-phenyl]-propionitrile, or the monotosylate salt form. the synthesis of BEZ235 is described in WO2006/122806; CCG168 (otherwise known as AZD-8055, Chresta, C. M., et al., Cancer Res, 2010, 70(1), 288-298) which has the chemical name {5-[2,4-bis-((S)-3-methyl-morpholin-4-yl)-pyrido[2,3d]pyrimidin-7-yl]-2-methoxy-phenyl}-methanol; 3-[2,4-bis[(3S)-3-methylmorpholin-4-yl]pyrido[2,3-d]pyrimidin-7-yl]-N-methylbenzamide (WO09104019); 3-(2-aminobenzo[d]oxazol-5-yl)-1-isopropyl-1H-pyrazolo[3,4-d]pyrimidin-4-amine (WO10051043 and WO2013023184); A N-(3-(N-(3-((3,5-dimethoxyphenyl)amino)quinoxaline-2-yl)sulfamoyl)phenyl)-3-methoxy-4-methylbenzamide (WO07044729 and WO12006552); PKI-587 (Venkatesan, A. M., J. Med. Chem., 2010, 53, 2636-2645) which has the chemical name 1-[4-[4-(dimethylamino)piperidine-1-carbonyl]phenyl]-3-[4-(4,6-dimorpholino-1,3,5-triazin-2-yl)phenyl]urea; GSK-2126458 (ACS Med. Chem. Lett., 2010, 1, 39-43) which has the chemical name 2,4-difluoro-N-{2-methoxy-5-[4-(4-pyridazinyl)-6-quinolinyl]-3-pyridinyl}benzenesulfonamide; 5-(9-isopropyl-8-methyl-2-morpholino-9H-purin-6-yl)pyrimidin-2-amine (WO10114484); (E)-N-(8-(6-amino-5-(trifluoromethyl)pyridin-3-yl)-1-(6-(2-cyanopropan-2-yl)pyridin-3-yl)-3-methyl-1H-imidazo[4,5-c]quinolin-2(3H)-ylidene)cyanamide (WO12007926).

[0520] Further examples of catalytic mTOR inhibitors include 8-(6-methoxy-pyridin-3-yl)-3-methyl-1-(4-piperazin-1-yl-3-trifluoromethyl-phenyl)-1,3-dihydro-imidazo[4,5-c]quinolin-2-one (WO2006/122806) and Ku-0063794 (Garcia-Martinez J M, et al., Biochem J., 2009, 421(1), 29-42. Ku-0063794 is a specific inhibitor of the mammalian target of rapamycin (mTOR).) WYE-354 is another example of a catalytic mTor inhibitor (Yu K, et al. (2009). Biochemical, Cellular, and In vivo Activity of Novel ATP-Competitive and Selective Inhibitors of the Mammalian Target of Rapamycin. Cancer Res. 69(15): 6232-6240).

[0521] mTOR inhibitors useful according to the present invention also include prodrugs, derivatives, pharmaceutically acceptable salts, or analogs thereof of any of the foregoing.

[0522] mTOR inhibitors, such as RAD001, may be formulated for delivery based on well-established methods in the art based on the particular dosages described herein. In particular, U.S. Pat. No. 6,004,973 (incorporated herein by reference) provides examples of formulations useable with the mTOR inhibitors described herein.

### Inhibitory Molecule Inhibitors/Checkpoint Inhibitors

[0523] In one embodiment, the subject can be administered an agent which enhances the activity of a CAR-expressing cell. For example, in one embodiment, the agent can be an agent which inhibits a checkpoint molecule. Checkpoint molecules, e.g., Programmed Death 1 (PD1), can, in some embodiments, decrease the ability of a CAR-expressing cell to mount an immune effector response. Examples of inhibitory molecules, e.g., checkpoint molecules include PD1, PD-L1, PD-L2, CTLA4, TIM3, CEACAM (e.g., CEACAM-1, CEACAM-3 and/or CEACAM-5), LAG3, VISTA, BTLA, TIGIT, LAIR1, CD160, 2B4, CD80, CD86, B7-H3 (CD276), B7-H4 (VTCN1), HVEM (TNFRSF14 or CD270), KIR, A2aR, MHC class I, MHC class II, GAL9, adenosine, and TGFR (e.g., TGFRbeta). In embodiments, the CAR-expressing cell described herein comprises a switch costimulatory receptor, e.g., as described in WO 2013/019615, which is incorporated herein by reference in its entirety.

[0524] The methods described herein can include administration of a CAR-expressing cell in combination with a checkpoint inhibitor. In one embodiment, the checkpoint inhibitor is administered prior to the CAR-expressing cell, e.g., two weeks, 12 days, 10 days, 8 days, one week, 6 days, 5 days, 4 days, 3 days, 2 days or 1 day before administration of the CAR-expressing cell. In some embodiments, the checkpoint inhibitor is administered concurrently with the CAR-expressing cell.

[0525] Inhibition of a checkpoint molecule, e.g., by inhibition at the DNA, RNA or protein level, can optimize a CAR-expressing cell performance. In embodiments, an inhibitory nucleic acid, e.g., an inhibitory nucleic acid, e.g., a dsRNA, e.g., a siRNA or shRNA, a clustered regularly interspaced short palindromic repeats (CRISPR), a transcription-activator like effector nuclease (TALEN), or a zinc finger endonuclease (ZFN), e.g., as described herein, can be used to inhibit expression of a checkpoint molecule in the CAR-expressing cell. In an embodiment, the inhibitor is a shRNA. In an embodiment, the checkpoint molecule is inhibited within a CAR-expressing cell. In these embodiments, a dsRNA molecule that inhibits expression of the checkpoint molecule is linked to the nucleic acid that encodes a component, e.g., all of the components, of the CAR.

[0526] In one embodiment, the inhibitor of an inhibitory signal can be, e.g., an antibody or antibody fragment that binds to a checkpoint molecule. For example, the agent can be an antibody or antibody fragment that binds to PD1, PD-L1, PD-L2 or CTLA4 (e.g., ipilimumab (also referred to as MDX-010 and MDX-101, and marketed as Yervoy®; Bristol-Myers Squibb; Tremelimumab (IgG2 monoclonal antibody available from Pfizer, formerly known as ticilimumab, CP-675,206). In an embodiment, the agent is an antibody or antibody fragment that binds to TIM3. In an embodiment, the agent is an antibody or antibody fragment that binds to LAG3. In an embodiment, the agent is an antibody or antibody fragment that binds to CEACAM.

[0527] PD1 is an inhibitory member of the CD28 family of receptors that also includes CD28, CTLA-4, ICOS, and BTLA. PD1 is expressed on activated B cells, T cells and myeloid cells (Agata et al. 1996 INT. IMMUNOL 8:765-75). Two ligands for PD1, PD-L1 and PD-L2 have been shown to downregulate T cell activation upon binding to PD1 (Freeman et a. 2000 J Exp Med 192:1027-34; Latchman et al. 2001 NAT IMMUNOL 2:261-8; Carter et al. 2002 EUR J IMMUNOL 32:634-43). PD-L1 is abundant in human cancers (Dong et al. 2003 J MOL MED 81:281-7; Blank et al. 2005 CANCER IMMUNOL. IMMUNOTHER. 54:307-314; Konishi et al. 2004 CLIN CANCER RES 10:5094). Immune suppression can be reversed by inhibiting the local interaction of PD1 with PD-L1.

[0528] Antibodies, antibody fragments, and other inhibitors of PD1, PD-L1 and PD-L2 are available in the art and may be used combination with a CAR described herein, e.g., a CD19 CAR described herein. For example, nivolumab (also referred to as BMS-936558 or MDX1106; Bristol-Myers Squibb) is a fully human IgG4 monoclonal antibody which specifically blocks PD1. Nivolumab (clone 5C4) and other human monoclonal antibodies that specifically bind to PD1 are disclosed in U.S. Pat. No. 8,008,449 and WO2006/121168. Pidilizumab (CT-011; Cure Tech) is a humanized IgG1k monoclonal antibody that binds to PD1Pidilizumab and other humanized anti-PD1 monoclonal antibodies are disclosed in WO2009/101611. Lambrolizumab (also referred to as MK03475; Merck) is a humanized IgG4 monoclonal antibody that binds to PD1. Lambrolizumab and other humanized anti-PD1 antibodies are disclosed in U.S. Pat. No. 8,354,509 and WO2009/114335. MDPL3280A (Genentech/Roche) is a human Fc optimized IgG1 monoclonal antibody that binds to PD-L1. MDPL3280A and other human monoclonal antibodies to PD-L1 are disclosed in U.S. Pat. No.: 7,943,743 and U.S Publication No.: 20120039906. Other anti-PD-L1 binding agents include YW243.55.570 (heavy and light chain variable regions are shown in SEQ ID NOs 20 and 21 in WO2010/077634) and MDX-1 105 (also referred to as BMS-936559, and, e.g., anti-PD-L1 binding agents disclosed in WO2007/005874). AMP-224 (B7-DCIg; Amplimmune; e.g., disclosed in WO2010/027827 and WO2011/066342), is a PD-L2 Fc fusion soluble receptor that blocks the interaction between PD1 and B7-H1. Other anti-PD1 antibodies include AMP 514 (Amplimmune), among others, e.g., anti-PD1 antibodies disclosed in U.S. Pat. No. 8,609,089, US 2010028330, and/or US 20120114649.

[0529] In one embodiment, the anti-PD-1 antibody or fragment thereof is an anti-PD-1 antibody molecule as described in US 2015/0210769, entitled “Antibody Molecules to PD-1 and Uses Thereof,” incorporated by reference in its entirety. In one embodiment, the anti-PD-1 antibody molecule includes at least one, two, three, four, five or six CDRs (or collectively all of the CDRs) from a heavy and light chain variable region from an antibody chosen from any of BAP049-hum01, BAP049-hum02, BAP049-hum03, BAP049-hum04, BAP049-hum05, BAP049-hum06, BAP049-hum07, BAP049-hum08, BAP049-hum09, BAP049-hum10, BAP049-hum11, BAP049-hum12, BAP049-hum13, BAP049-hum14, BAP049-hum15, BAP049-hum16, BAP049-Clone-A, BAP049-Clone-B, BAP049-Clone-C, BAP049-Clone-D, or BAP049-Clone-E; or as described in Table 1 of US 2015/0210769, or encoded by the nucleotide sequence in Table 1, or a sequence substantially identical (e.g., at least 80%, 85%, 90%, 92%, 95%, 97%, 98%, 99% or higher identical) to any of the aforesaid sequences; or closely related CDRs, e.g., CDRs which are identical or which have at least one amino acid alteration, but not more than two, three or four alterations (e.g., substitutions, deletions, or insertions, e.g., conservative substitutions).

[0530] In yet another embodiment, the anti-PD-1 antibody molecule comprises at least one, two, three or four variable regions from an antibody described herein, e.g., an antibody chosen from any of BAP049-hum01, BAP049-hum02, BAP049-hum03, BAP049-hum04, BAP049-hum05, BAP049-hum06, BAP049-hum07, BAP049-hum08, BAP049-hum09, BAP049-hum10, BAP049-hum11, BAP049-hum12, BAP049-hum13, BAP049-hum14, BAP049-hum15, BAP049-hum16, BAP049-Clone-A, BAP049-Clone-B, BAP049-Clone-C, BAP049-Clone-D, or BAP049-Clone-E; or as described in Table 1 of US 2015/0210769, or encoded by the nucleotide sequence in Table 1; or a sequence substantially identical (e.g., at least 80%, 85%, 90%, 92%, 95%, 97%, 98%, 99% or higher identical) to any of the aforesaid sequences.

[0531] TIM3 (T cell immunoglobulin-3) also negatively regulates T cell function, particularly in IFN-g-secreting CD4+ T helper 1 and CD8+ T cytotoxic 1 cells, and plays a critical role in T cell exhaustion. Inhibition of the interaction between TIM3 and its ligands, e.g., galectin-9 (Gal9), phosphotidylserine (PS), and HMGB1, can increase immune response. Antibodies, antibody fragments, and other inhibitors of TIM3 and its ligands are available in the art and may be used combination with a CD19 CAR described herein. For example, antibodies, antibody fragments, small molecules, or peptide inhibitors that target TIM3 binds to the IgV domain of TIM3 to inhibit interaction with its ligands. Antibodies and peptides that inhibit TIM3 are disclosed in WO2013/006490 and US20100247521. Other anti-TIM3 antibodies include humanized versions of RMT3-23 (disclosed in Ngiow et al., 2011, Cancer Res, 71:3540-3551), and clone 8B.2C12 (disclosed in Monney et al., 2002, Nature, 415:536-541). Bi-specific antibodies that inhibit TIM3 and PD-1 are disclosed in US20130156774.

[0532] In one embodiment, the anti-TIM3 antibody or fragment thereof is an anti-TIM3 antibody molecule as described in US 2015/0218274, entitled “Antibody Molecules to TIM3 and Uses Thereof,” incorporated by reference in its entirety. In one embodiment, the anti-TIM3 antibody molecule includes at least one, two, three, four, five or six CDRs (or collectively all of the CDRs) from a heavy and light chain variable region from an antibody chosen from any of ABTIM3, ABTIM3-hum01, ABTIM3-hum02, ABTIM3-hum03, ABTIM3-hum04, ABTIM3-hum05, ABTIM3-hum06, ABTIM3-hum07, ABTIM3-hum08, ABTIM3-hum09, ABTIM3-hum10, ABTIM3-hum11, ABTIM3-hum12, ABTIM3-hum13, ABTIM3-hum14, ABTIM3-hum15, ABTIM3-hum16, ABTIM3-hum17, ABTIM3-hum18, ABTIM3-hum19, ABTIM3-hum20, ABTIM3-hum21, ABTIM3-hum22, ABTIM3-hum23; or as described in Tables 1-4 of US 2015/0218274; or encoded by the nucleotide sequence in Tables 1-4; or a sequence substantially identical (e.g., at least 80%, 85%, 90%, 92%, 95%, 97%, 98%, 99% or higher identical) to any of the aforesaid sequences, or closely related CDRs, e.g., CDRs which are identical or which have at least one amino acid alteration, but not more than two, three or four alterations (e.g., substitutions, deletions, or insertions, e.g., conservative substitutions).

[0533] In yet another embodiment, the anti-TIM3 antibody molecule comprises at least one, two, three or four variable regions from an antibody described herein, e.g., an antibody chosen from any of ABTIM3, ABTIM3-hum01, ABTIM3-hum02, ABTIM3-hum03, ABTIM3-hum04, ABTIM3-hum05, ABTIM3-hum06, ABTIM3-hum07, ABTIM3-hum08, ABTIM3-hum09, ABTIM3-hum10, ABTIM3-hum11, ABTIM3-hum12, ABTIM3-hum13, ABTIM3-hum14, ABTIM3-hum15, ABTIM3-hum16, ABTIM3-hum17, ABTIM3-hum18, ABTIM3-hum19, ABTIM3-hum20, ABTIM3-hum21, ABTIM3-hum22, ABTIM3-hum23; or as described in Tables 1-4 of US 2015/0218274; or encoded by the nucleotide sequence in Tables 1-4; or a sequence substantially identical (e.g., at least 80%, 85%, 90%, 92%, 95%, 97%, 98%, 99% or higher identical) to any of the aforesaid sequences.

[0534] In other embodiments, the agent which enhances the activity of a CAR-expressing cell is a CEACAM inhibitor (e.g., CEACAM-1, CEACAM-3, and/or CEACAM-5 inhibitor). In one embodiment, the inhibitor of CEACAM is an anti-CEACAM antibody molecule. Exemplary anti-CEACAM-1 antibodies are described in WO 2010/125571, WO 2013/082366 WO 2014/059251 and WO 2014/022332, e.g., a monoclonal antibody 34B1, 26H7, and 5F4; or a recombinant form thereof, as described in, e.g., US 2004/0047858, U.S. Pat. No. 7,132,255 and WO 99/052552. In other embodiments, the anti-CEACAM antibody binds to CEACAM-5 as described in, e.g., Zheng et al. PLoS One. 2010 Sep. 2; 5(9). pii: e12529 (DOI:10:1371/journal.pone.0021146), or crossreacts with CEACAM-1 and CEACAM-5 as described in, e.g., WO 2013/054331 and US 2014/0271618.

[0535] Without wishing to be bound by theory, carcinoembryonic antigen cell adhesion molecules (CEACAM), such as CEACAM-1 and CEACAM-5, are believed to mediate, at least in part, inhibition of an anti-tumor immune response (see e.g., Markel et al. J Immunol. 2002 Mar. 15; 168(6):2803-10; Markel et al. J Immunol. 2006 Nov 1;177(9):6062-71; Markel et al. Immunology. 2009 February; 126(2):186-200; Markel et al. Cancer Immunol Immunother. 2010 February; 59(2):215-30; Ortenberg et al. Mol Cancer Ther. 2012 June; 11(6):1300-10; Stern et al. J Immunol. 2005 Jun. 1; 174(11):6692-701; Zheng et al. PLoS One. 2010 Sep. 2; 5(9). pii: e12529). For example, CEACAM-1 has been described as a heterophilic ligand for TIM-3 and as playing a role in TIM-3-mediated T cell tolerance and exhaustion (see e.g., WO 2014/022332; Huang, et al. (2014) Nature doi:10.1038/nature13848). In embodiments, co-blockade of CEACAM-1 and TIM-3 has been shown to enhance an anti-tumor immune response in xenograft colorectal cancer models (see e.g., WO 2014/022332; Huang, et al. (2014), supra). In other embodiments, co-blockade of CEACAM-1 and PD-1 reduce T cell tolerance as described, e.g., in WO 2014/059251. Thus, CEACAM inhibitors can be used with the other immunomodulators described herein (e.g., anti-PD-1 and/or anti-TIM-3 inhibitors) to enhance an immune response against a cancer, e.g., a melanoma, a lung cancer (e.g., NSCLC), a bladder cancer, a colon cancer an ovarian cancer, and other cancers as described herein.

[0536] LAG3 (lymphocyte activation gene-3 or CD223) is a cell surface molecule expressed on activated T cells and B cells that has been shown to play a role in CD8+ T cell exhaustion. Antibodies, antibody fragments, and other inhibitors of LAG3 and its ligands are available in the art and may be used combination with a CD19 CAR described herein. For example, BMS-986016 Bristol-Myers Squib) is a monoclonal antibody that targets LAW. IMP701 (Immutep) is an antagonist LAG3 antibody and IMP73 I (Immutep and GlaxoSmithKline) is a depleting LAG3 antibody. Other LAG3 inhibitors include IMP:321 (Immutep), which is a recombinant fusion protein of a soluble portion of LAG3 and Ig that binds to MHC class II molecules and activates antigen presenting cells (APC). Other antibodies are disclosed, e.g., in WO2010/019570.

[0537] In some embodiments, the agent which enhances the activity of a CAR-expressing cell can be, e.g., a fusion protein comprising a first domain and a second domain, wherein the first domain is a checkpoint molecule, or fragment thereof, and the second domain is a polypeptide that is associated with a positive signal, e.g., a polypeptide comprising an intracellular signaling domain as described herein (also referred to herein as an inhibitory CAR or iCAR). In some embodiments, the polypeptide that is associated with a positive signal can include a costimulatory domain of CD28, CD27, ICOS, e.g., an intracellular signaling domain of CD28, CD27 and/or ICOS, and/or a primary signaling domain, e.g., of CD3 zeta, e.g., described herein. In one embodiment, the fusion protein is expressed by the same cell that expressed the CAR. In another embodiment, the fusion protein is expressed by a cell, e.g., a T cell that does not express a CAR, e.g., a CD19 CAR.

[0538] In one embodiment, the extracellular domain (ECD) of a checkpoint molecule, e.g., a checkpoint molecule described herein such as, e.g., Programmed Death 1 (PD1), can be fused to a transmembrane domain and intracellular signaling domain described herein, e.g., an intracellular signaling domain comprising a costimulatory signaling domain such as, e.g., 41BB OX40, Cd28, CD27, and/or a primary signaling domain, e.g., of CD3 zeta. In one embodiment, the inhibitory CAR, e.g., e.g., PD1 CAR, can be used in combination with another CAR, e.g., CD19CAR (e.g., a CD19RCAR). In one embodiment, the PD1 RCAR (or PD1 CAR) improves the persistence of the T cell. Examples of inhibitory molecules include PD1, PD-L1, PD-L2, CTLA4, TIM3, CEACAM (e.g., CEACAM-1, CEACAM-3 and/or CEACAM-5), LAG3, VISTA, BTLA, TIGIT, LAIR1, CD160, 2B4, CD80, CD86, B7-H3 (CD276), B7-H4 (VTCN1), HVEM (TNFRSF14 or CD270), KIR, A2aR, MHC class I, MHC class II, GAL9, adenosine, and TGFR (e.g., TGFRbeta). In one embodiment, the inhibitory molecule CAR comprises a first polypeptide, e.g., of an inhibitory molecule such as PD1, PD-L1, PD-L2, CTLA4, TIM3, CEACAM (e.g., CEACAM-1, CEACAM-3 and/or CEACAM-5), LAG3, VISTA, BTLA, TIGIT, LAIR1, CD160, 2B4, CD80, CD86, B7-H3 (CD276), B7-H4 (VTCN1), HVEM (TNFRSF14 or CD270), KIR, A2aR, MHC class I, MHC class II, GAL9, adenosine, and TGFR (e.g., TGFRbeta), or a fragment of any of these (e.g., at least a portion of an extracellular domain of any of these), and a second polypeptide which is an intracellular signaling domain described herein (e.g., comprising a costimulatory domain (e.g., 41BB, CD27 or CD28, e.g., as described herein) and/or a primary signaling domain (e.g., a CD3 zeta signaling domain described herein).

[0539] In one embodiment, the inhibitory molecule CAR comprises the extracellular domain (ECD) of PD1fused to a transmembrane domain and intracellular signaling domains such as 41BB and CD3 zeta (also referred to herein as a PD1 CAR). In one embodiment, the PD1 CAR improves the persistence of the cell CAR-expressing cell.

[0540] In embodiments, the inhibitory extracellular domain, has at least 70, 75, 80, 85, 90, 95, 96, 97, 98, or 99% identity with, or differs by no more than 30, 25, 20, 15, 10, 5, 4, 3, 2, or 1 amino acid residues from the corresponding residues of a naturally occurring human inhibitory molecule, e.g., a naturally occurring human primary stimulatory molecule disclosed herein.

[0541] In an embodiment, a nucleic acid molecule that encodes a dsRNA molecule that inhibits expression of the molecule that modulates or regulates, e.g., inhibits, T-cell function is operably linked to a promoter, e.g., a H1- or a U6-derived promoter such that the dsRNA molecule that inhibits expression of the molecule that modulates or regulates, e.g., inhibits, T-cell function is expressed, e.g., is expressed within a CAR-expressing cell. See e.g., Tiscornia G., “Development of Lentiviral Vectors Expressing siRNA,” Chapter 3, in Gene Transfer: Delivery and Expression of DNA and RNA (eds. Friedmann and Rossi). Cold Spring Harbor Laboratory Press, Cold Spring Harbor, N.Y., USA, 2007; Brummelkamp T R, et al. (2002) Science 296: 550-553; Miyagishi M, et al. (2002) Nat. Biotechnol. 19: 497-500. In an embodiment the nucleic acid molecule that encodes a dsRNA molecule that inhibits expression of the molecule that modulates or regulates, e.g., inhibits, T-cell function is present on the same vector, e.g., a lentiviral vector, that comprises a nucleic acid molecule that encodes a component, e.g., all of the components, of the CAR. In such an embodiment, the nucleic acid molecule that encodes a dsRNA molecule that inhibits expression of the molecule that modulates or regulates, e.g., inhibits, T-cell function is located on the vector, e.g., the lentiviral vector, 5′- or 3′- to the nucleic acid that encodes a component, e.g., all of the components, of the CAR. The nucleic acid molecule that encodes a dsRNA molecule that inhibits expression of the molecule that modulates or regulates, e.g., inhibits, T-cell function can be transcribed in the same or different direction as the nucleic acid that encodes a component, e.g., all of the components, of the CAR.

[0542] In an embodiment the nucleic acid molecule that encodes a dsRNA molecule that inhibits expression of the molecule that modulates or regulates, e.g., inhibits, T-cell function is present on a vector other than the vector that comprises a nucleic acid molecule that encodes a component, e.g., all of the components, of the CAR. In an embodiment, the nucleic acid molecule that encodes a dsRNA molecule that inhibits expression of the molecule that modulates or regulates, e.g., inhibits, T-cell function it transiently expressed within a CAR-expressing cell.

[0543] In an embodiment, the nucleic acid molecule that encodes a dsRNA molecule that inhibits expression of the molecule that modulates or regulates, e.g., inhibits, T-cell function is stably integrated into the genome of a CAR-expressing cell. In an embodiment, the molecule that modulates or regulates, e.g., inhibits, T-cell function is PD-1.

[0544] In embodiments, the agent that enhances the activity of a CAR-expressing cell, e.g., inhibitor of an inhibitory molecule, is administered in combination with an allogeneic CAR, e.g., an allogeneic CAR described herein (e.g., described in the Allogeneic CAR section herein).

### Natural Killer Cell Receptor (NKR) CARs

[0545] In an embodiment, the CAR molecule described herein comprises one or more components of a natural killer cell receptor (NKR), thereby forming an NKR-CAR. The NKR component can be a transmembrane domain, a hinge domain, or a cytoplasmic domain from any of the following natural killer cell receptors: killer cell immunoglobulin-like receptor (KIR), e.g., KIR2DL1, KIR2DL2/L3, KIR2DL4, KIR2DL5A, KIR2DL5B, KIR2DS1, KIR2DS2, KIR2DS3, KIR2DS4, DIR2DS5, KIR3DL1/S1, KIR3DL2, KIR3DL3, KIR2DP1, and KIR3DP1; natural cytotoxicity receptor (NCR), e.g., NKp30, NKp44, NKp46; signaling lymphocyte activation molecule (SLAM) family of immune cell receptors, e.g., CD48, CD229, 2B4, CD84, NTB-A, CRACC, BLAME, and CD2F-10; Fc receptor (FcR), e.g., CD16, and CD64; and Ly49 receptors, e.g., LY49A, LY49C. The NKR-CAR molecules described herein may interact with an adaptor molecule or intracellular signaling domain, e.g., DAP12. Exemplary configurations and sequences of CAR molecules comprising NKR components are described in International Publication No. WO2014/145252, the contents of which are hereby incorporated by reference.

### Split CAR

[0546] In some embodiments, the CAR-expressing cell uses a split CAR. The split CAR approach is described in more detail in publications WO2014/055442 and WO2014/055657, incorporated herein by reference. Briefly, a split CAR system comprises a cell expressing a first CAR having a first antigen binding domain and a costimulatory domain (e.g., 41BB), and the cell also expresses a second CAR having a second antigen binding domain and an intracellular signaling domain (e.g., CD3 zeta). When the cell encounters the first antigen, the costimulatory domain is activated, and the cell proliferates. When the cell encounters the second antigen, the intracellular signaling domain is activated and cell-killing activity begins. Thus, the CAR-expressing cell is only fully activated in the presence of both antigens.

### Strategies for Regulating Chimeric Antigen Receptors

[0547] There are many ways CAR activities can be regulated. In some embodiments, a regulatable CAR (RCAR) where the CAR activity can be controlled is desirable to optimize the safety and efficacy of a CAR therapy. There are many ways CAR activities can be regulated. For example, inducible apoptosis using, e.g., a caspase fused to a dimerization domain (see, e.g., Di Stasa et al., N Engl. J. Med. 2011 Nov. 3; 365(18):1673-1683), can be used as a safety switch in the CAR therapy of the instant invention. In one embodiment, the cells (e.g., T cells or NK cells) expressing a CAR of the present invention further comprise an inducible apoptosis switch, wherein a human caspase (e.g., caspase 9) or a modified version is fused to a modification of the human FKB protein that allows conditional dimerization. In the presence of a small molecule, such as a rapalog (e.g., AP 1903, AP20187), the inducible caspase (e.g., caspase 9) is activated and leads to the rapid apoptosis and death of the cells (e.g., T cells or NK cells) expressing a CAR of the present invention. Examples of a caspase-based inducible apoptosis switch (or one or more aspects of such a switch) have been described in, e.g., US2004040047; US20110286980; US20140255360; WO1997031899; WO2014151960; WO2014164348; WO2014197638; WO2014197638; all of which are incorporated by reference herein.

[0548] In another example, CAR-expressing cells can also express an inducible Caspase-9 (iCaspase-9) molecule that, upon administration of a dimerizer drug (e.g., rimiducid (also called AP1903 (Bellicum Pharmaceuticals) or AP20187 (Ariad)) leads to activation of the Caspase-9 and apoptosis of the cells. The iCaspase-9 molecule contains a chemical inducer of dimerization (CID) binding domain that mediates dimerization in the presence of a CID. This results in inducible and selective depletion of CAR-expressing cells. In some cases, the iCaspase-9 molecule is encoded by a nucleic acid molecule separate from the CAR-encoding vector(s). In some cases, the iCaspase-9 molecule is encoded by the same nucleic acid molecule as the CAR-encoding vector. The iCaspase-9 can provide a safety switch to avoid any toxicity of CAR-expressing cells. See, e.g., Song et al. Cancer Gene Ther. 2008; 15(10):667-75; Clinical Trial Id. No. NCT02107963; and Di Stasi et al. N. Engl. J. Med. 2011; 365:1673-83.

[0549] Alternative strategies for regulating the CAR therapy of the instant invention include utilizing small molecules or antibodies that deactivate or turn off CAR activity, e.g., by deleting CAR-expressing cells, e.g., by inducing antibody dependent cell-mediated cytotoxicity (ADCC). For example, CAR-expressing cells described herein may also express an antigen that is recognized by molecules capable of inducing cell death, e.g., ADCC or complement-induced cell death. For example, CAR expressing cells described herein may also express a receptor capable of being targeted by an antibody or antibody fragment. Examples of such receptors include EpCAM, VEGFR, integrins (e.g., integrins αvβ3, α4, αI¾β3, α4β7, α5β1, αvβ3, αv), members of the TNF receptor superfamily (e.g., TRAIL-R1 , TRAIL-R2), PDGF Receptor, interferon receptor, folate receptor, GPNMB, ICAM-1, HLA-DR, CEA, CA-125, MUC1, TAG-72, IL-6 receptor, 5T4, GD2, GD3, CD2, CD3, CD4, CD5, CD1 1, CD1 1 a/LFA-1, CD15, CD18/ITGB2, CD19, CD20, CD22, CD23/IgE Receptor, CD25, CD28, CD30, CD33, CD38, CD40, CD41, CD44, CD51, CD52, CD62L, CD74, CD80, CD125, CD147/basigin, CD152/CTLA-4, CD154/CD40L, CD195/CCR5, CD319/SLAMF7, and EGFR, and truncated versions thereof (e.g., versions preserving one or more extracellular epitopes but lacking one or more regions within the cytoplasmic domain).

[0550] For example, a CAR-expressing cell described herein may also express a truncated epidermal growth factor receptor (EGFR) which lacks signaling capacity but retains the epitope that is recognized by molecules capable of inducing ADCC, e.g., cetuximab (ERBITUX®), such that administration of cetuximab induces ADCC and subsequent depletion of the CAR-expressing cells (see, e.g., WO2011/056894, and Jonnalagadda et al., Gene Ther. 2013; 20(8)853-860). Another strategy includes expressing a highly compact marker/suicide gene that combines target epitopes from both CD32 and CD20 antigens in the CAR-expressing cells described herein, which binds rituximab, resulting in selective depletion of the CAR-expressing cells, e.g., by ADCC (see, e.g., Philip et al., Blood. 2014; 124(8)1277-1287). Other methods for depleting CAR-expressing cells described herein include administration of CAMPATH, a monoclonal anti-CD52 antibody that selectively binds and targets mature lymphocytes, e.g., CAR-expressing cells, for destruction, e.g., by inducing ADCC. In other embodiments, the CAR-expressing cell can be selectively targeted using a CAR ligand, e.g., an anti-idiotypic antibody. In some embodiments, the anti-idiotypic antibody can cause effector cell activity, e.g., ADCC or ADC activities, thereby reducing the number of CAR-expressing cells. In other embodiments, the CAR ligand, e.g., the anti-idiotypic antibody, can be coupled to an agent that induces cell killing, e.g., a toxin, thereby reducing the number of CAR-expressing cells. Alternatively, the CAR molecules themselves can be configured such that the activity can be regulated, e.g., turned on and off, as described below.

[0551] In other embodiments, a CAR-expressing cell described herein may also express a target protein recognized by the T cell depleting agent. In one embodiment, the target protein is CD20 and the T cell depleting agent is an anti-CD20 antibody, e.g., rituximab. In such embodiment, the T cell depleting agent is administered once it is desirable to reduce or eliminate the CAR-expressing cell, e.g., to mitigate the CAR induced toxicity. In other embodiments, the T cell depleting agent is an anti-CD52 antibody, e.g., alemtuzumab, as described in the Examples herein.

[0552] In other embodiments, an RCAR comprises a set of polypeptides, typically two in the simplest embodiments, in which the components of a standard CAR described herein, e.g., an antigen binding domain and an intracellular signalling domain, are partitioned on separate polypeptides or members. In some embodiments, the set of polypeptides include a dimerization switch that, upon the presence of a dimerization molecule, can couple the polypeptides to one another, e.g., can couple an antigen binding domain to an intracellular signalling domain. In one embodiment, a CAR of the present invention utilizes a dimerization switch as those described in, e.g., WO2014127261, which is incorporated by reference herein. Additional description and exemplary configurations of such regulatable CARs are provided herein and in, e.g., paragraphs 527-551 of International Publication No. WO 2015/090229 filed Mar. 13, 2015, which is incorporated by reference in its entirety. In some embodiments, an RCAR involves a switch domain, e.g., a FKBP switch domain, as set out SEQ ID NO: 92, or comprise a fragment of FKBP having the ability to bind with FRB, e.g., as set out in SEQ ID NO: 93. In some embodiments, the RCAR involves a switch domain comprising a FRB sequence, e.g., as set out in SEQ ID NO: 94, or a mutant FRB sequence, e.g., as set out in any of SEQ ID Nos. 95-100.

Co-Expression of CAR with a Chemokine Receptor

[0553] In embodiments, the CAR-expressing cell described herein further comprises a chemokine receptor molecule. Transgenic expression of chemokine receptors CCR2b or CXCR2 in T cells enhances trafficking to CCL2- or CXCL1-secreting solid tumors including melanoma and neuroblastoma (Craddock et al., J Immunother. 2010 October; 33(8):780-8 and Kershaw et al., Hum Gene Ther. 2002 Nov. 1; 13(16):1971-80). Thus, without wishing to be bound by theory, it is believed that chemokine receptors expressed in CAR-expressing cells that recognize chemokines secreted by tumors, e.g., solid tumors, can improve homing of the CAR-expressing cell to the tumor, facilitate the infiltration of the CAR-expressing cell to the tumor, and enhances antitumor efficacy of the CAR-expressing cell. The chemokine receptor molecule can comprise a naturally occurring or recombinant chemokine receptor or a chemokine-binding fragment thereof. A chemokine receptor molecule suitable for expression in a CAR-expressing cell described herein include a CXC chemokine receptor (e.g., CXCR1, CXCR2, CXCR3, CXCR4, CXCR5, CXCR6, or CXCR7), a CC chemokine receptor (e.g., CCR1, CCR2, CCR3, CCR4, CCR5, CCR6, CCR7, CCR8, CCR9, CCR10, or CCR11), a CX3C chemokine receptor (e.g., CX3CR1), a XC chemokine receptor (e.g., XCR1), or a chemokine-binding fragment thereof. In one embodiment, the chemokine receptor molecule to be expressed with a CAR described herein is selected based on the chemokine(s) secreted by the tumor. In one embodiment, the CAR-expressing cell described herein further comprises, e.g., expresses, a CCR2b receptor or a CXCR2 receptor. In an embodiment, the CAR described herein and the chemokine receptor molecule are on the same vector or are on two different vectors. In embodiments where the CAR described herein and the chemokine receptor molecule are on the same vector, the CAR and the chemokine receptor molecule are each under control of two different promoters or are under the control of the same promoter.

### Pharmaceutical Compositions and Treatments

[0554] Pharmaceutical compositions may comprise a CAR-expressing cell, e.g., a plurality of CAR-expressing cells, as described herein, in combination with one or more pharmaceutically or physiologically acceptable carriers, diluents or excipients. Such compositions may comprise buffers such as neutral buffered saline, phosphate buffered saline and the like; carbohydrates such as glucose, mannose, sucrose or dextrans, mannitol; proteins; polypeptides or amino acids such as glycine; antioxidants; chelating agents such as EDTA or glutathione; adjuvants (e.g., aluminum hydroxide); and preservatives. Compositions can be, e.g., formulated for intravenous administration.

[0555] Pharmaceutical compositions of the present disclosure may be administered in a manner appropriate to the disease to be treated (or prevented). The quantity and frequency of administration will be determined by such factors as the condition of the patient, and the type and severity of the patient's disease, although appropriate dosages may be determined by clinical trials.

[0556] In one embodiment, the pharmaceutical composition is substantially free of, e.g., there are no detectable levels of a contaminant, e.g., a contaminant described in paragraph 1009 of International Application WO2015/142675, filed Mar. 13, 2015, which is herein incorporated by reference in its entirety.

[0557] When “an immunologically effective amount,” “an anti-tumor effective amount,” “a tumor-inhibiting effective amount,” or “therapeutic amount” is indicated, the precise amount of the compositions of the present invention to be administered can be determined by a physician with consideration of individual differences in age, weight, tumor size, extent of infection or metastasis, and condition of the patient (subject). It can generally be stated that a pharmaceutical composition comprising the immune effector cells (e.g., T cells, NK cells) described herein may be administered at a dosage of 10⁴ to 10⁹ cells/kg body weight, in some instances 10⁵ to 10⁶ cells/kg body weight, including all integer values within those ranges. T cell compositions may also be administered multiple times at these dosages. The cells can be administered by using infusion techniques that are commonly known in immunotherapy (see, e.g., Rosenberg et al., NEW ENG. J. OF MED. 319:1676, 1988).

[0558] In some embodiments, a dose of CAR cells (e.g., CD19 CAR cells) comprises about 1×10⁶, 1.1×10⁶, 2×10⁶, 3.6×10⁶, 5×10⁶, 1×10⁷, 1.8×10⁷, 2×10⁷, 5×10⁷, 1×10⁸, 2×10⁸, or 5×10⁸ cells/kg. In some embodiments, a dose of CAR cells (e.g., CD19 CAR cells) comprises at least about 1×10⁶, 1.1×10⁶, 2×10⁶, 3.6×10⁶, 5×10⁶, 1×10⁷, 1.8×10⁷, 2×10⁷, 5×10⁷, 1×10⁸, 2×10⁸, or 5×10⁸ cells/kg. In some embodiments, a dose of CAR cells (e.g., CD19 CAR cells) comprises up to about 1×10⁶, 1.1×10⁶, 2×10⁶, 3.6×10⁶, 5×10⁶, 1×10⁷, 1.8×10⁷, 2×10⁷, 5×10⁷, 1×10⁸, 2×10⁸, or 5×10⁸ cells/kg. In some embodiments, a dose of CAR cells (e.g., CD19 CAR cells) comprises about 1.1×10⁶-1.8×10⁷ cells/kg. In some embodiments, a dose of CAR cells (e.g., CD19 CAR cells) comprises about 1×10⁷, 2×10⁷, 5×10⁷, 1×10⁸, 2×10⁸, 5×10⁸, 1×10⁹, 2×10⁹, or 5×10⁹ cells. In some embodiments, a dose of CAR cells (e.g., CD19 CAR cells) comprises at least about 1×10⁷, 2×10⁷, 5×10⁷, 1×10⁸, 2×10⁸, 5×10⁸, 1×10⁹, 2×10⁹, or 5×10⁹ cells. In some embodiments, a dose of CAR cells (e.g., CD19 CAR cells) comprises up to about 1×10⁷, 2×10⁷, 5×10⁷, 1×10⁸, 2×10⁸, 5×10⁸, 1×10⁹, 2×10⁹, or 5×10⁹ cells.

[0559] In certain aspects, it may be desired to administer activated immune effector cells (e.g., T cells, NK cells) to a subject and then subsequently redraw blood (or have an apheresis performed), activate immune effector cells (e.g., T cells, NK cells) therefrom according to the present disclosure, and reinfuse the patient with these activated and expanded immune effector cells (e.g., T cells, NK cells). This process can be carried out multiple times every few weeks. In certain aspects, immune effector cells (e.g., T cells, NK cells) can be activated from blood draws of from 10 cc to 400 cc. In certain aspects, immune effector cells (e.g., T cells, NK cells) are activated from blood draws of 20 cc, 30 cc, 40 cc, 50 cc, 60 cc, 70 cc, 80 cc, 90 cc, or 100 cc.

[0560] The administration of the subject compositions may be carried out in any convenient manner, including by aerosol inhalation, injection, ingestion, transfusion, implantation or transplantation. The compositions described herein may be administered to a patient trans arterially, subcutaneously, intradermally, intratumorally, intranodally, intramedullary, intramuscularly, by intravenous (i.v.) injection, or intraperitoneally. In one aspect, the T cell compositions described herein are administered to a patient by intradermal or subcutaneous injection. In one aspect, the T cell compositions described herein are administered by i.v. injection. The compositions of immune effector cells (e.g., T cells, NK cells) may be injected directly into a tumor, lymph node, or site of infection.

[0561] In a particular exemplary aspect, subjects may undergo leukapheresis, wherein leukocytes are collected, enriched, or depleted ex vivo to select and/or isolate the cells of interest, e.g., T cells. These T cell isolates may be expanded by methods known in the art and treated such that one or more CAR constructs described herein may be introduced, thereby creating a CAR T cell of the present disclosure. Subjects in need thereof may subsequently undergo standard treatment with high dose chemotherapy followed by peripheral blood stem cell transplantation. In certain aspects, following or concurrent with the transplant, subjects receive an infusion of the expanded CAR T cells described herein. In an additional aspect, expanded cells are administered before or following surgery.

[0562] The dosage of the above treatments to be administered to a patient will vary with the precise nature of the condition being treated and the recipient of the treatment. The scaling of dosages for human administration can be performed according to art-accepted practices. The dose for CAMPATH, for example, will generally be in the range 1 to about 100 mg for an adult patient, usually administered daily for a period between 1 and 30 days. A suitable daily dose is 1 to 10 mg per day although in some instances larger doses of up to 40 mg per day may be used (described in U.S. Pat. No. 6,120,766).

[0563] In one embodiment, the CAR is introduced into immune effector cells (e.g., T cells, NK cells), e.g., using in vitro transcription, and the subject (e.g., human) receives an initial administration of CAR immune effector cells (e.g., T cells, NK cells) of the invention, and one or more subsequent administrations of the CAR immune effector cells (e.g., T cells, NK cells) of the invention, wherein the one or more subsequent administrations are administered less than 15 days, e.g., 14, 13, 12, 11, 10, 9, 8, 7, 6, 5, 4, 3, or 2 days after the previous administration. In one embodiment, more than one administration of the CAR immune effector cells (e.g., T cells, NK cells) described herein are administered to the subject (e.g., human) per week, e.g., 2, 3, or 4 administrations of the CAR immune effector cells (e.g., T cells, NK cells) of the invention are administered per week. In one embodiment, the subject (e.g., human subject) receives more than one administration of the CAR immune effector cells (e.g., T cells, NK cells) per week (e.g., 2, 3 or 4 administrations per week) (also referred to herein as a cycle), followed by a week of no CAR immune effector cells (e.g., T cells, NK cells) administrations, and then one or more additional administration of the CAR immune effector cells (e.g., T cells, NK cells) (e.g., more than one administration of the CAR immune effector cells (e.g., T cells, NK cells) per week) is administered to the subject. In another embodiment, the subject (e.g., human subject) receives more than one cycle of CAR immune effector cells (e.g., T cells, NK cells), and the time between each cycle is less than 10, 9, 8, 7, 6, 5, 4, or 3 days. In one embodiment, the CAR immune effector cells (e.g., T cells, NK cells) are administered every other day for 3 administrations per week. In one embodiment, the CAR immune effector cells (e.g., T cells, NK cells) described herein are administered for at least two, three, four, five, six, seven, eight or more weeks.

[0564] In one aspect, CAR-expressing cells (e.g., T cells, NK cells) as described herein such as, e.g., CD19 CAR-expressing cells, e.g., CTL019 are generated using lentiviral viral vectors, such as lentivirus. CAR-expressing cells generated that way can have stable CAR expression.

[0565] In one aspect, CAR-expressing cells (e.g., T cells, NK cells) transiently express CAR vectors for 4, 5, 6, 7, 8, 9, 10, 11, 12, 13, 14, 15 days after transduction. Transient expression of CARs can be effected by RNA CAR vector delivery. In one aspect, the CAR RNA is transduced into the cell by electroporation.

[0566] A potential issue that can arise in patients being treated using transiently expressing CAR cells, e.g., T cells (particularly with murine scFv bearing CAR-expressing cells (e.g., T cells, NK cells)) is anaphylaxis after multiple treatments. Without being bound by this theory, it is believed that such an anaphylactic response might be caused by a patient developing humoral anti-CAR response, i.e., anti-CAR antibodies having an anti-IgE isotype. It is thought that a patient's antibody producing cells undergo a class switch from IgG isotype (that does not cause anaphylaxis) to IgE isotype when there is a ten to fourteen day break in exposure to antigen.

[0567] If a patient is at high risk of generating an anti-CAR antibody response during the course of transient CAR therapy (such as those generated by RNA transductions), CAR-expressing cell (e.g., T cell, NK cell) infusion breaks should not last more than ten to fourteen days.

[0568] In some embodiments of any of the aforesaid methods, the method further includes administering one or more doses of a cell (e.g., an immune cell containing a CAR nucleic acid or CAR polypeptide as described herein), to a mammal (e.g., a mammal having a cancer). In some embodiments, the one or more doses of CAR cells (e.g., CD19 CAR cells) comprises at least about 1×10⁶, 5×10⁶, 1×10⁷, 2×10⁷, 5×10⁷, 1×10⁸, 2×10⁸, 5×10⁸, 1×10⁹, 2×10⁹, or 5×10⁹ cells.

[0569] In one embodiment, up to 10, 9, 8, 7, 6, 5, 4, 3, or 2 doses of cells are administered. In other embodiments, one, two, three, four, five or 6 doses of the cells are administered to the mammal, e.g., in a treatment interval of one, two, three, four or more weeks. In one embodiment, up to 6 doses are administered in two weeks. The doses may the same or different. In one embodiment, a lower dose is administered initially, followed by one or more higher doses. In one exemplary embodiment, the lower dose is about 1×10⁵ to 1×10⁹ cells/kg, or 1×10⁶ to 1×10⁸ cells/kg; and the higher dose is about 2×10⁵ to 2×10⁹ cells/kg or 2×10⁶ to 2×10⁸ cells/kg, followed by 3-6 doses of about 4×10⁵ to 4×10⁹ cells/kg, or 4×10⁶ to 4×10⁸ cells/kg.

[0570] In one embodiment, the one or more doses of the cells are administered after one or more lymphodepleting therapies, e.g., a lymphodepleting chemotherapy. In one embodiment, the lymphodepleting therapy includes a chemotherapy (e.g., cyclophosphamide).

[0571] In one embodiment, the one or more doses is followed by a cell transplant, e.g., an allogeneic hematopoietic stem cell transplant. For example, the allogeneic hematopoietic stem cell transplant occurs between about 20 to about 35 days, e.g., between about 23 and 33 days.

### Biopolymer Delivery Methods

[0572] In some embodiments, one or more CAR-expressing cells as disclosed herein can be administered or delivered to the subject via a biopolymer scaffold, e.g., a biopolymer implant. Biopolymer scaffolds can support or enhance the delivery, expansion, and/or dispersion of the CAR-expressing cells described herein. A biopolymer scaffold comprises a biocompatible (e.g., does not substantially induce an inflammatory or immune response) and/or a biodegradable polymer that can be naturally occurring or synthetic. Exemplary biopolymers are described, e.g., in paragraphs 1004-1006 of International Application WO2015/142675, filed Mar. 13, 2015, which is herein incorporated by reference in its entirety.

### Exemplary Computer System

[0573] Various computer systems can be specially configured to leverage information returned on a signature described herein. In some embodiments, the computer system can determine and present information on confidence levels associated with various signatures described herein. In an embodiment, the disclosure provides a system for evaluating cancer (e.g., a hematological cancer such as ALL and CLL) in a subject, comprising: at least one processor operatively connected to a memory, the at least one processor when executing is configured to: acquiring a signature of a sample of a manufactured CAR-expressing cell composition (e.g., a CAR-expressing cell product), wherein the signature comprises the number, frequency, and/or percentage of one of the following cell populations in the sample

[0574] wherein each cell of the cell population expresses: IL2; IFNγ; IL17A; TNF; IL8; CD107a; IL2 and IFNγ; IL2 and IL17A; IL2 and TNF; IL2 and IL8; IL2 and CD107a; IFNγ and IL17A; IFNγ and TNF; IFN and IL8; IFNγ and CD107a; IL17A and TNF; IL17A and IL8; IL17A and CD107a; TNF and IL8; TNF and CD107a; IL8 and CD107a; IL2, IFNγ, and IL17A; IL2, IFNγ, and TNF; IL2, IFNγ, and IL8; IL2, IFNγ, and CD107a; IL2, IL17A, and TNF; IL2, IL17A, and IL8; IL2, IL17A, and CD107a; IL2, TNF, and IL8; IL2, TNF, and CD107a; IL2, IL8, and CD107a; IFNγ, IL17A, and TNF; IFNγ, IL17A, and IL8; IFNγ, IL17A, and CD107a; IFNγ, TNF, and IL8; IFNγ, TNF, and CD107a; IFNγ, IL8, and CD107a; IL17A, TNF, and IL8; IL17A, TNF, and CD107a; IL17A, IL8, and CD107a; TNF, IL8, and CD107a; IL2, IFNγ, IL17A, and TNF; IL2, IFNγ, IL17A, and IL8; IL2, IFNγ, IL17A, and CD107a; IL2, IFNγ, TNF, and IL8; IL2, IFNγ, TNF, and CD107a; IL2, IFNγ, IL8, and CD107a; IL2, IL17A, TNF, and IL8; IL2, IL17A, TNF, and CD107a; IL2, IL17A, IL8, and CD107a; IL2, TNF, IL8, and CD107a; IFNγ, IL17A, TNF, and IL8; IFNγ, IL17A, TNF, and CD107a; IFNγ, IL17A, IL8, and CD107a; IFNγ, TNF, IL8, and CD107a; IL17A, TNF, IL8, and CD107a; IL2, IFNγ, IL17A, TNF, and IL8; IL2, IFNγ, IL17A, TNF, and CD107a; IL2, IFNγ, IL17A, IL8, and CD107a; IL2, IFNγ, TNF, IL8, and CD107a; IL2, IFNγ, IL17A, TNF, IL8, and CD107a; IL2, IL17A, TNF, IL8, and CD107a; or IFNγ, IL17A, TNF, IL8, or CD107a

[0575] ; and

[0576] responsive to said signature, performing one, two, three, four or more of:

[0577] recommending a CAR-expressing cell (e.g., T cell, NK cell) therapy (e.g., a CD19 CAR-expressing cell (e.g., T cell, NK cell) therapy as described herein, such as, e.g., CTL019);

[0578] recommending a selection or alteration of a dosing regimen (e.g., dose, schedule, timing) of a CAR-expressing cell (e.g., T cell, NK cell) therapy; or

[0579] recommending an alternative therapy, e.g., a standard of care for the particular cancer. In an embodiment, the invention provides a system for evaluating cancer (e.g., a hematological cancer such as ALL and CLL) in a subject, comprising: at least one processor operatively connected to a memory, the at least one processor when executing is configured to: acquire acquiring a signature of a sample of a manufactured CAR-expressing cell composition (e.g., a CAR-expressing cell product), wherein the signature comprises the number, frequency, and/or percentage of one of the following cell populations in the wherein each cell of the cell population expresses: IL2; IFNγ; IL17A; TNF; IL8; CD107a; IL2 and IFNγ; IL2 and IL17A; IL2 and TNF; IL2 and IL8; IL2 and CD107a; IFNγ and IL17A; IFNγ and TNF; IFN and IL8; IFNγ and CD107a; IL17A and TNF; IL17A and IL8; IL17A and CD107a; TNF and IL8; TNF and CD107a; IL8 and CD107a; IL2, IFNγ, and IL17A; IL2, IFNγ, and TNF; IL2, IFNγ, and IL8; IL2, IFNγ, and CD107a; IL2, IL17A, and TNF; IL2, IL17A, and IL8; IL2, IL17A, and CD107a; IL2, TNF, and IL8; IL2, TNF, and CD107a; IL2, IL8, and CD107a; IFNγ, IL17A, and TNF; IFNγ, IL17A, and IL8; IFNγ, IL17A, and CD107a; IFNγ, TNF, and IL8; IFNγ, TNF, and CD107a; IFNγ, IL8, and CD107a; IL17A, TNF, and IL8; IL17A, TNF, and CD107a; IL17A, IL8, and CD107a; TNF, IL8, and CD107a; IL2, IFNγ, IL17A, and TNF; IL2, IFNγ, IL17A, and IL8; IL2, IFNγ, IL17A, and CD107a; IL2, IFNγ, TNF, and IL8; IL2, IFNγ, TNF, and CD107a; IL2, IFNγ, IL8, and CD107a; IL2, IL17A, TNF, and IL8; IL2, IL17A, TNF, and CD107a; IL2, IL17A, IL8, and CD107a; IL2, TNF, IL8, and CD107a; IFNγ, IL17A, TNF, and IL8; IFNγ, IL17A, TNF, and CD107a; IFNγ, IL17A, IL8, and CD107a; IFNγ, TNF, IL8, and CD107a; IL17A, TNF, IL8, and CD107a; IL2, IFNγ, IL17A, TNF, and IL8; IL2, IFNγ, IL17A, TNF, and CD107a; IL2, IFNγ, IL17A, IL8, and CD107a; IL2, IFNγ, TNF, IL8, and CD107a; IL2, IFNγ, IL17A, TNF, IL8, and CD107a; IL2, IL17A, TNF, IL8, and CD107a; or IFNγ, IL17A, TNF, IL8, or CD107a

[0580] ; and

[0581] responsive to said signature, performing one, two, three, four or more of:

[0582] recommending a CAR-expressing cell (e.g., T cell, NK cell) therapy (e.g., a CD19 CAR-expressing cell (e.g., T cell, NK cell) therapy as described herein, such as, e.g., CTL019);

[0583] recommending a selection or alteration of a dosing regimen (e.g., dose, schedule, timing) of a CAR-expressing cell (e.g., T cell, NK cell) therapy; or

[0584] recommending an alternative therapy, e.g., a standard of care for the particular cancer.

[0585] FIG. 8 is a block diagram of a distributed computer system 200, in which various aspects and functions in accord with the present disclosure may be practiced. The distributed computer system 200 may include one or more computer systems. For example, as illustrated, the distributed computer system 200 includes three computer systems 202, 204 and 206. As shown, the computer systems 202, 204 and 206 are interconnected by, and may exchange data through, a communication network 208. The network 208 may include any communication network through which computer systems may exchange data. To exchange data via the network 208, the computer systems 202, 204, and 206 and the network 208 may use various methods, protocols and standards including, among others, token ring, Ethernet, Wireless Ethernet, Bluetooth, radio signaling, infra-red signaling, TCP/IP, UDP, HTTP, FTP, SNMP, SMS, MMS, SS2, JSON, XML, REST, SOAP, CORBA HOP, RMI, DCOM and Web Services.

[0586] According to some embodiments, the functions and operations discussed for identifying, treating or preventing cancer (e.g., a hematological cancer such as ALL and CLL) in a subject can be executed on computer systems 202, 204 and 206 individually and/or in combination. For example, the computer systems 202, 204, and 206 support, for example, participation in a collaborative operations, which may include analyzing treatment data captured on a patient population. In one alternative, a single computer system (e.g., 202) can analyze treatment data captured on a subject (e.g., patient) population to develop characterization models and/or identify independent indicators for disease activity. The computer systems 202, 204 and 206 may include personal computing devices such as cellular telephones, smart phones, tablets, etc., and may also include desktop computers, laptop computers, etc.

[0587] Various aspects and functions in accord with the present disclosure may be implemented as specialized hardware or software executing in one or more computer systems including the computer system 202 shown in FIG. 8. In one embodiment, computer system 202 is a computing device specially configured to execute the processes and/or operations discussed above. For example, the system can present user interfaces to end-users that present treatment information, diagnostic information, and confidence levels associated with the signature and/or genetic indicators, among other options. As depicted, the computer system 202 includes at least one processor 210 (e.g., a single core or a multi-core processor), a memory 212, a bus 214, input/output interfaces (e.g., 216) and storage 218. The processor 210, may include one or more microprocessors or other types of controllers, and can perform a series of instructions that manipulate data (e.g., treatment data, testing data, etc.). As shown, the processor 210 is connected to other system components, including a memory 212, by an interconnection element (e.g., the bus 214).

[0588] The memory 212 and/or storage 218 may be used for storing programs and data during operation of the computer system 202. For example, the memory 212 may be a relatively high performance, volatile, random access memory such as a dynamic random access memory (DRAM) or static memory (SRAM). In addition, the memory 212 may include any device for storing data, such as a disk drive or other non-volatile storage device, such as flash memory, solid state, or phase-change memory (PCM). In further embodiments, the functions and operations discussed with respect to identifying, treating or preventing cancer (e.g., ALL and/or CLL) in a subject can be embodied in an application that is executed on the computer system 202 from the memory 212 and/or the storage 218.

[0589] Computer system 202 also includes one or more interfaces 216 such as input devices, output devices, and combination input/output devices. The interfaces 216 may receive input, provide output, or both. The storage 218 may include a computer-readable and computer-writeable nonvolatile storage medium in which instructions are stored that define a program to be executed by the processor. The storage system 218 also may include information that is recorded, on or in, the medium, and this information may be processed by the application. A medium that can be used with various embodiments may include, for example, optical disk, magnetic disk or flash memory, SSD, among others.

[0590] Further, the invention is not limited to a particular memory system or storage system. Although the computer system 202 is shown by way of example as one type of computer system upon which various functions for identifying, treating or preventing cancer (e.g., a hematological cancer such as ALL and CLL) in a subject may be practiced, aspects of the invention are not limited to being implemented on the computer system, shown in FIG. 8. Various aspects and functions in accord with the present invention may be practiced on one or more computers having different architectures or components than that shown in FIG. 8.

[0591] In some embodiments, the computer system 202 may include an operating system that manages at least a portion of the hardware components (e.g., input/output devices, touch screens, cameras, etc.) included in computer system 202. One or more processors or controllers, such as processor 210, may execute an operating system which may be, among others, a Windows-based operating system (e.g., Windows NT, ME, XP, Vista, 2, 8, or RT) available from the Microsoft Corporation, an operating system available from Apple Computer (e.g., MAC OS, including System X), one of many Linux-based operating system distributions (for example, the Enterprise Linux operating system available from Red Hat Inc.), a Solaris operating system available from Sun Microsystems, or a UNIX operating systems available from various sources. Many other operating systems may be used, including operating systems designed for personal computing devices (e.g., iOS, Android, etc.) and embodiments are not limited to any particular operating system.

[0592] According to one embodiment, the processor and operating system together define a computing platform on which applications may be executed. Additionally, various functions for identifying, treating or preventing cancer (e.g., a hematological cancer such as ALL and CLL) in a subject may be implemented in a non-programmed environment (for example, documents created in HTML, XML or other format that, when viewed in a window of a browser program, render aspects of a graphical-user interface or perform other functions). Further, various embodiments in accord with aspects of the present disclosure may be implemented as programmed or non-programmed components, or any combination thereof. Thus, the disclosure is not limited to a specific programming language and any suitable programming language could also be used.

### EXEMPLIFICATION

[0593] The invention is further described in detail by reference to the following experimental examples. These examples are provided for purposes of illustration only, and are not intended to be limiting unless otherwise specified. Thus, the invention should in no way be construed as being limited to the following examples, but rather, should be construed to encompass any and all variations which become evident as a result of the teaching provided herein.

[0594] Without further description, it is believed that one of ordinary skill in the art can, using the preceding description and the following illustrative examples, make and utilize the compounds of the present invention and practice the claimed methods. The following working examples specifically point out various aspects of the present invention, and are not to be construed as limiting in any way the remainder of the disclosure.

### EXAMPLE 1

### Single Cell In Vitro Characterization Assay for CAR-T Cell Immunotherapy

[0595] The present Example describes the development of an in vitro assay to characterize CAR-T cell immunotherapy. Among other things, the present Example describes novel cytokine signatures of manufactured CD19 CAR-expressing cell (e.g., T cell, NK cell) product samples (e.g., CTL019) prior to re-infusion.

[0596] In particular, the present Example describes methods of analyzing cytokine signatures that can be used to, inter alia, manufacture CAR-T immunotherapy, determine and/or administer a specified dose, predict patient response to CD19 CAR-expressing cell (e.g., T cell, NK cell) (e.g., CTL019) therapy in cancer (e.g., CLL or ALL), for use in accordance with the present invention.
[0597] 1 Cell culture protocol
[0598] 1.1 Cell recovery
[0599] 1. Record sample ID. A reference cell (RC) sample is to be included in each experiment.
[0600] 2. If the sample is frozen, follow BiopharmOps Morris Plains Cell Cryopreservation and Thaw. If the sample is fresh, place on Dynamag magnet for 2 minutes to remove any residual beads, then skip to step 4.
[0601] 3. Transfer cells into a clean 15 mL conical tube.
[0602] 4. Add 10 mL of X-VIVO 15 (Lonza®) containing 0.2 ug/ml Dnase.
[0603] 5. Centrifuge at 250 G for 5 minutes at room temperature.
[0604] 6. After centrifugation is complete, carefully aspirate the supernatant without disturbing the pellet.
[0605] 7. Re-suspend the pellet in 10 ml X-VIVO 15 containing 0.2 ug/ml Dnase culture medium.
[0606] 8. Obtain a white blood cell count according to “AM64060 Cell Count” for the sample(s).
[0607] 9. Centrifuge at 250 G for 5 minutes at room temperature.
[0608] 10. Aspirate the supernatant and re-suspend the pellet in X-VIVO 15 (+IL-2) to bring cell concentration to 1×10⁶ cells/mL.
[0609] 11. Culture cells in clean T25 flasks for 24±2 hours in a humidified CO2 incubator at 37° C.
[0610] 1.2 Set up co-culture assay
[0611] 1. Prepare cells
   [0612] a. Re-count cells. Record cell count and viability.
   [0613] b. Centrifuge cells at 250 G for 5 minutes at room temperature.
   [0614] c. Aspirate the supernatant and re-suspend the pellet in X-VIVO 15 (no IL-2) to bring cell concentration to 4 ×10⁶ cells/mL.
   [0615] d. For each testing sample, plate 6 wells for duplicate stimulation of cell stim, anti-ID and IgG control. Add 100 μl cell suspension into each well. For RC, plate 6 wells for stimulations and 6 extra wells for FMOs. A representative plate map is shown in FIG. 1.
[0616] 2. Prepare stimulation reagents at the working concentration.
   [0617] a. Wash beads before use. Transfer the desired volume of IgG control beads, anti-ID beads into two separate clean 15 mL conical tubes appropriately labeled.
   [0618] b. Add 10 times the volume of X-VIVO 15 (no IL-2) culture medium. Place the tubes in a DyanMag-15 magnet for 2 min and discard the supernatant.
   [0619] c. Re-suspend beads with X-VIVO 15 (no IL-2) medium of original bead volume.
   [0620] d. Prepare bead working solution as Table 13.
   [0621] e. Prepare cell stim working solution as Table 13.

TABLE 13
Working stimulation reagent

| | | | Medium | |
|---|---|---|---|---|
| | Stock | Reagent | (No IL-2) | Total Volume |
| Reagent | Concentration | (ul/well) | (ul/well) | (ul/well) |
| Cell stim | | 0.4 | 99.6 | 100 |
| Anti-ID beads | 4E8/ml | 2 | 98 | 100 |
| IgG control | 4E8/ml | 2 | 98 | 100 |
| beads | | | | |

[0622] 3. Add 100 ul stimulation reagent into specified wells as exemplified in FIG. 1. Note: the first 5 FMOs get 100 μl cell stim and the last FMO for CD107a gets 100 μl medium.
[0623] 4. Prepare Golgi inhibitor solution at the working concentration following Table 14. Add 20 μl Golgi inhibitor solution into each well.

TABLE 14
Working Golgi inhibitor solution

| | GolgiStop | GolgiPlug | Medium | |
|---|---|---|---|---|
| | (Monensin) | (Brefeldin A) | (No IL-2) | Total Volume |
| Reagent | (ul/well) | (ul/well) | (ul/well) | (ul/well) |
| Golgi inhibitors | 0.067 | 0.2 | 20 | 20 |

[0624] 5. Prepare CD107a staining solution at the working concentration following Table 15. Add 20 μl CD107a solution into each well. Note: Add CD107a into CD107a FMO for background control.

TABLE 15
Working CD107a solution

| | Reagent | Medium (No IL-2) | Total Volume |
|---|---|---|---|
| Reagent | (ul/sample) | (ul/well) | (ul/well) |
| CD107a | 0.067 | 20 | 20 |

[0625] 6. Pipette to mix cells with stimulation and other reagents. Culture cells for 17±1 hour in a humidified CO2 incubator at 37° C.
[0626] 2. Staining Procedure

TABLE 16
ICS Panel design. The core panel includes 6 intracellular markers:
IL-2, IFN-γ, CD107a, IL-17a, TNF-α and IL-8.

| Fluorophore | |
|---|---|
| (changeable) | Marker |
| BV510 | Viability |
| AF700 | CD3 |
| PerCP | CD4 |
| APCH7 | CD8 |
| BV421 | IL-2 (core panel) |
| PE-CF594 | IFN-γ (core panel) |
| APC | CD107a (core panel) |
| FITC | IL-17a (core panel) |
| PE-Cy7 | TNF-α (core panel) |
| PE | IL-8 (core panel) |

[0627] 2.1 Prepare staining buffer and reagents.
[0628] 1. Prepare 1× Perm/Wash buffer by diluting 15 ml 10× Perm/Wash buffer into 135 ml dH2O. 150 ml 1× Perm/Wash buffer is sufficient for one 96 well plate.
[0629] 2. Prepare viability dye following CM64005, Immunophenotyping of CTL019 IPC and Final product samples.
[0630] 3. Prepare antibody master mix for surface markers. Use within one week.

TABLE 17
Antibody master mix for surface markers

| Ab Master Mix | ul/well |
|---|---|
| CD3 | 0.5 |
| CD4 | 1 |
| CD8 | 0.5 |
| Ab Mix | 2 |
| FACS buffer | 38 |
| Total | 40 |

[0631] 4. Prepare antibody master mix for intracellular markers. Antibody master mix for intracellular markers is prepared on the day of staining.

TABLE 18
Antibody master mix for intracellular staining

| Ab Master Mix | ul/well |
|---|---|
| IL-2 | 1 |
| IFN-g | 1 |
| TNF-a | 1 |
| IL17a | 1 |
| IL-8 | 1 |
| CD107a | 0 |
| Ab Mix | 5 |
| Perm/wash buffer | 35 |
| Total volume | 40 |

[0632] 5. Prepare antibody master mix for 6 FMOs. Antibody master mix for FMOs is prepared on the day of staining.

TABLE 19
Antibody master mix for FMOs

| | ul/well | | | | | |
|---|---|---|---|---|---|---|
| | FMO1A | FMO2A | FMO3A | FMO4A | FMO5A | FMO6A |
| Marker | -IL2 | -IFNγ | -TNF-a | -IL17A | -IL8 | -CD107a |
| IL-2 | 0 | 1 | 1 | 1 | 1 | 1 |
| IFN-g | 1 | 0 | 1 | 1 | 1 | 1 |
| TNF-a | 1 | 1 | 0 | 1 | 1 | 1 |
| IL17a | 1 | 1 | 1 | 0 | 1 | 1 |
| IL-8 | 1 | 1 | 1 | 1 | 0 | 1 |
| CD107a | 0 | 0 | 0 | 0 | 0 | 0 |
| Ab Mix | 4 | 4 | 4 | 4 | 4 | 5 |
| Perm/wash | 36 | 36 | 36 | 36 | 36 | 35 |
| buffer | | | | | | |
| Total | 40 | 40 | 40 | 40 | 40 | 40 |
| volume | | | | | | |

### 2.2 Stain Cells

[0633] 1. After incubation, pipet to complete suspend cell-bead complex. Place the plate on a 96 well magnetic stand for 2 minutes and transfer them to a round-bottom 96-well plate for staining.
[0634] 2. Centrifuge at 500×G for 4 minutes at room temperature.
[0635] 3. After centrifugation, decant the supernatant into the appropriate waste container.
[0636] 4. Add 100 μl of viability dye mixture to each well. Pipette to suspend the pellet.
[0637] 5. Incubate in dark at room temperature for 15 minutes.
[0638] 6. Add 100 μl of FACS buffer to each well. Centrifuge at 500×G for 4 minutes.
[0639] 7. Decant the supernatant into the appropriate waste container.
[0640] 8. Add 40 μl of surface antibody master mix to each well. Incubate in dark at room temperature for 30 minutes.
[0641] 9. Add 100 μl of FACS buffer to each well. Centrifuge at 500×G for 4 minutes.
[0642] 10. Decant the supernatant into the appropriate waste container. Add 200 μl of FACS buffer to each well. Centrifuge at 500×G for 4 minutes.
[0643] 11. Repeat step 11.
[0644] 12. Add 100 μl of Cytofix/Cytoperm buffer to each well. Incubate in dark at 4 degree for 20 minutes.
[0645] 13. Add 100 μl of Perm/wash buffer to each well. Centrifuge at 700×G for 4 minutes.
[0646] 14. Decant the supernatant into the appropriate waste container. Add 200 μl of Perm/wash buffer to each well. Centrifuge at 700×G for 4 minutes.
[0647] 15. Repeat Step 4.3.15. Decant the supernatant into the appropriate waste container. Samples can be re-suspended in FACS buffer and store in dark at 4 ° C. for up to 3 days.
[0648] 16. Add 40 μl of intracellular antibody master mix to each well. Incubate in dark at room temperature for 30 minutes.
[0649] 17. Repeat washing following Step 14-16
[0650] 18. Re-suspend cells in 200 μl FACS buffer and acquire the sample within one day on Flow cytometer.
[0651] 3. Data acquisition and analysis
[0652] 3.1 Data acquisition
[0653] 1. Flow cytometric acquisition is performed using a BD LSRFORTESSA™ flow cytometer utilizing FACSDiva software.
[0654] 2. Open FACSDiva software, click on the Experiment folder named ICS on the left side of navigation panel of the software. Samples should be run within the ICS Experiment, which has predefined cytometer configuration and template.
[0655] 3. Verify the stopping gate is set at 100 μl samples or 300,000 events in live CD3 gates.
[0656] 4. Acquire samples.
[0657] 3.2 Automatic analysis of data using R script.

[0658] Gating of lymphocytes, live CD3, CD4, and CD8 is shown in FIG. 2. Gating of IL2, IFN, IL17A, TNF, IL8 and CD107a in live CD3 cells is shown in FIG. 3. Gating of IL2, IFN, IL17A, TNF, IL8 and CD107a in CD4+cells is shown in FIG. 4. Gating of IL2, IFN, IL17A, TNF, IL8 and CD107a in CD8+ cells is shown in FIG. 5. The automatic data analysis reports Count, Frequency and MFI for the following populations: “Live CD3+”, “CD4”, “CD8+” “Live CD3+IL2”, “Live CD3+IFN”, “Live CD3+IL17A”, “Live CD3+TNF”, “Live CD3+IL8”, “Live CD3+CD107a”, “CD4+IL2”, “CD4+IFN”, “CD4+IL17A”, “CD4+TNF”, “CD4+IL8”, “CD4+CD107a”, “CD8+IL2”, “CD8+IFN”, “CD8+IL17A”, “CD8+TNF”, “CD8+IL8” and “CD8+CD107a”. The automatic data analysis reports Frequency of cells producing 0,1,2,3,4,5, or 6 proteins with in the CD3, CD4 or CD8 population. The automatic data analysis also reports Frequency of all the Boolean gates with in CD3, CD4 or CD8 population, including:“IL2+IFN+IL17A+TNF+IL8+CD107a”, “IL2”, “IFN”, “IL17A”, “TNF”, “IL8”, “CD107a”, “IL2+IFN”, “IL2+IL17A”, “IL2+TNF”, “IL2+IL8”, “IL2+CD107a”, “IFN+IL17A”, “IFN+TNF”, “IFN+IL8”, “IFN+CD107a”, “IL17A+TNF”, “IL17A+IL8”, “IL17A+CD107a”, “TNF+IL8”, “TNF+CD107a”, “IL8+CD107a”, “IL2+IFN+IL17A”, “IL2+IFN+TNF”, “IL2+IFN+IL8”, “IL2+IFN+CD107a”, “IL2+IL17A+TNF”, “IL2+IL17A+IL8”, “IL2+IL17A+CD107a”, “IL2+TNF+IL8”, “IL2+TNF+CD107a”, “IL2+IL8+CD107a”, “IFN+IL17A+TNF”, “IFN+IL17A+IL8”, “IFN+IL17A+CD107a”, “IFN+TNF+IL8”, “IFN+TNF+CD107a”, “IFN+IL8+CD107a”, “IL17A+TNF+IL8”, “IL17A+TNF+CD107a”, “IL17A+IL8+CD107a”, “TNF+IL8+CD107a”, “IL2+IFN+IL17A+TNF”, “IL2+IFN+IL17A+IL8”, “IL2+IFN+IL17A+CD107a”, “IL2+IFN+TNF+IL8”, “IL2+IFN+TNF+CD107a”, “IL2+IFN+IL8+CD107a”, “IL2+IL17A+TNF+IL8”, “IL2+IL17A+TNF+CD107a”, “IL2+IL17A+IL8+CD107a”, “IL2+TNF+IL8+CD107a”, “IFN+IL17A+TNF+IL8”, “IFN+IL17A+TNF+CD107a”, “IFN+IL17A+IL8+CD107a”, “IFN+TNF+IL8+CD107a”, “IL17A+TNF+IL8+CD107a”, “IL2+IFN+IL17A+TNF+IL8”, “IL2+IFN+IL17A+TNF+CD107a”, “IL2+IFN+IL17A+IL8+CD107a”, “IL2+IFN+TNF+IL8+CD107a”, “IL2+IL17A+TNF+IL8+CD107a”, “IFN+IL17A+TNF+IL8+CD107a”.

### EXAMPLE 2

### In Vitro Cytokine Expression Signatures Predictive of In Vivo Pharmacokinetics of CAR-Expressing Cell

[0659] The present example describes the use of exemplary cytokine expression signatures to predict in vivo pharmacokinetics of CAR-expressing cell (e.g., T cell, or NK cell) therapy (e.g., a CD19 CAR-expressing cell (e.g., T cell, or NK cell therapy, e.g., a CTL019 therapy) in cancer (e.g., Chronic Lymphoid Leukemia (CLL) or Acute Lymphoblastic Leukemia (ALL)), for use in accordance with the present invention.

[0660] Among other things, the present Example describes novel cytokine expression signatures that predict the in vivo pharmacokinetics of manufactured CAR-expressing cell (e.g., T cell, NK cell) cell products based on cytokine expression signature following in vitro antigen specific activation.

[0661] In patients with pediatric acute lymphoblastic leukemia (pedALL), there was a high concordance of cytokine production profiles with clinical cellular kinetics of CART cells. For example, as shown in FIG. 7, the percent of CD8+ CAR-T cells with any protein production negatively correlated with in vivo T cell expansion in pedALL patients. Based on Pearson correlative studies using Cmax data from 20 pedALL patients, AUC0-28 and AUC0-84 data from 18 patients, significant negative correlations were observed between % Protein production in CD8 T cells with Cmax, AUC0-28 and AUC0-84, respectively. % Protein production was calculated by % cells with any protein production (anti-ID stimulation)−% cells with any protein production (control). Further, as shown in FIG. 8, the percent of CD8 cells simultaneously producing 2 proteins negatively correlated with in vivo T cell expansion. Based on Pearson correlative studies using Cmax data from 20 patients, AUC0-28 and AUC0-84 data from 18 patients, significant negative correlations were observed between % 2 Protein production in CD8 T cells with Cmax, AUC0-28 and AUC0-84, respectively. % 2 Protein production was calculated by % cells producing two proteins (anti-ID stimulation)−% cells producing two proteins (control).

[0662] Generally, the in vitro assay described herein measured antigen specific T cell cytokine production at the single CART cell level. The assay demonstrated superior sensitivity and signal to background ratio.

### Equivalents

[0663] Other embodiments of the invention will be apparent to those skilled in the art from a consideration of the specification or practice of the invention disclosed herein. While this invention has been disclosed with reference to specific aspects, it is apparent that other aspects and variations of this invention may be devised by others skilled in the art without departing from the true spirit and scope of the invention. The appended claims are intended to be construed to include all such aspects and equivalent variations.

1. A method of treating a subject having cancer, comprising:
acquiring a signature of a therapeutic composition comprising a plurality of immune effector cells engineered to express a chimeric antigen receptor (CAR cells), wherein the signature comprises the number, frequency, and/or percentage of one or more populations of CAR cells in a sample of the composition expressing: IL2; IFNγ; IL17A; TNF; IL8; CD107a; IL2 and IFNγ; IL2 and IL17A; IL2 and TNF; IL2 and IL8; IL2 and CD107a; IFNγ and IL17A; IFNγ and TNF; IFN and IL8; IFNγ and CD107a; IL17A and TNF; IL17A and IL8; IL17A and CD107a; TNF and IL8; TNF and CD107a; IL8 and CD107a; IL2, IFNγ, and IL17A; IL2, IFNγ, and TNF; IL2, IFNγ, and IL8; IL2, IFNγ, and CD107a; IL2, IL17A, and TNF; IL2, IL17A, and IL8; IL2, IL17A, and CD107a; IL2, TNF, and IL8; IL2, TNF, and CD107a; IL2, IL8, and CD107a; IFNγ, IL17A, and TNF; IFNγ, IL17A, and IL8; IFNγ, IL17A, and CD107a; IFNγ, TNF, and IL8; IFNγ, TNF, and CD107a; IFNγ, IL8, and CD107a; IL17A, TNF, and IL8; IL17A, TNF, and CD107a; IL17A, IL8, and CD107a; TNF, IL8, and CD107a; IL2, IFNγ, IL17A, and TNF; IL2, IFNγ, IL17A, and IL8; IL2, IFNγ, IL17A, and CD107a; IL2, IFNγ, TNF, and IL8; IL2, IFNγ, TNF, and CD107a; IL2, IFNγ, IL8, and CD107a; IL2, IL17A, TNF, and IL8; IL2, IL17A, TNF, and CD107a; IL2, IL17A, IL8, and CD107a; IL2, TNF, IL8, and CD107a; IFNγ, IL17A, TNF, and IL8; IFNγ, IL17A, TNF, and CD107a; IFNγ, IL17A, IL8, and CD107a; IFNγ, TNF, IL8, and CD107a; IL17A, TNF, IL8, and CD107a; IL2, IFNγ, IL17A, TNF, and IL8; IL2, IFNγ, IL17A, TNF, and CD107a; IL2, IFNγ, IL17A, IL8, and CD107a; IL2, IFNγ, TNF, IL8, and CD107a; IL2, IFNγ, IL17A, TNF, IL8, and CD107a; IL2, IL17A, TNF, IL8, and CD107a; and/or IFNγ, IL17A, TNF, IL8, and CD107a;
wherein an increase in the number, frequency, and/or percentage of the one or more populations of CAR cells is indicative of increased potency of the therapeutic composition relative to a control composition, and
responsive to said signature, performing one or more of:
administering the CAR-expressing cell product to the subject, thereby treating the subject;
determining a dosing regimen of the therapeutic composition and administering the therapeutic composition to the subject according to the determined dosing regimen, thereby treating the subject;
or
manufacturing the therapeutic composition by enriching for populations of CAR cells with a preselected signature and administering the composition to the subject, thereby treating the subject.

2. The method of claim 1, wherein the signature comprises the number, frequency, and/or percentage of one or more of the following populations of CAR cells in the sample, wherein each cell of the population of CAR cells expresses: IL2 and IFNγ; IL2 and IL17A; IL2 and TNF; IL2 and IL8; IL2 and CD107a; IFNγ and IL17A; IFNγ and TNF; IFN and IL8; IFNγ and CD107a; IL17A and TNF; IL17A and IL8; IL17A and CD107a; TNF and IL8; TNF and CD107a; or IL8 and CD107a.

3. The method of claim 1, wherein the signature comprises the number, frequency, and/or percentage of one or more of the following populations of CAR cells in the sample, wherein each cell of the population of CAR cells expresses: IL2, IFNγ, and IL17A; IL2, IFNγ, and TNF; IL2, IFNγ, and IL8; IL2, IFNγ, and CD107a; IL2, IL17A, and TNF; IL2, IL17A, and IL8; IL2, IL17A, and CD107a; IL2, TNF, and IL8; IL2, TNF, and CD107a; IL2, IL8, and CD107a; IFNγ, IL17A, and TNF; IFNγ, IL17A, and IL8; IFNγ, IL17A, and CD107a; IFNγ, TNF, and IL8; IFNγ, TNF, and CD107a; IFNγ, IL8, and CD107a; IL17A, TNF, and IL8; IL17A, TNF, and CD107a; IL17A, IL8, and CD107a; or TNF, IL8, and CD107a.

4. The method of claim 1, wherein the signature comprises the number, frequency, and/or percentage of one or more of the following populations of CAR cells in the sample, wherein each cell of the population of CAR cells expresses: IL2, IFNγ, IL17A, TNF, and IL8; IL2, IFNγ, IL17A, TNF, and CD107a; IL2, IFNγ, IL17A, IL8, and CD107a; IL2, IFNγ, TNF, IL8, and CD107a; IL2, IL17A, TNF, IL8, and CD107a; or IFNγ, IL17A, TNF, IL8, and CD107a.

5. The method of claim 1, wherein the signature comprises the number, frequency, and/or percentage of the following population of CAR cells in the sample, wherein each cell of the population of CAR cells expresses: IL2, IFNγ, IL17A, TNF, IL8, and CD107a.

6. The method of claim 1, wherein the signature comprises the number, frequency, and/or percentage of CD3+, CD4+, CD8+, CD3+/CD4+, CD3+/CD4+, or CD3+/CD4+ and CD3+/CD8+, live CD3+, live CD4+, live CD8+, live CD3+/CD4+, live CD3+/CD4+, or live CD3+/CD4+ and live CD3+/CD8+ cells in the sample which express: IL2; IFNγ; IL17A; TNF; IL8; CD107a; IL2 and IFNγ; IL2 and IL17A; IL2 and TNF; IL2 and IL8; IL2 and CD107a; IFNγ and IL17A; IFNγ and TNF; IFN and IL8; IFNγ and CD107a; IL17A and TNF; IL17A and IL8; IL17A and CD107a; TNF and IL8; TNF and CD107a; IL8 and CD107a; IL2, IFNγ, and IL17A; IL2, IFNγ, and TNF; IL2, IFNγ, and IL8; IL2, IFNγ, and CD107a; IL2, IL17A, and TNF; IL2, IL17A, and IL8; IL2, IL17A, and CD107a; IL2, TNF, and IL8; IL2, TNF, and CD107a; IL2, IL8, and CD107a; IFNγ, IL17A, and TNF; IFNγ, IL17A, and IL8; IFNγ, IL17A, and CD107a; IFNγ, TNF, and IL8; IFNγ, TNF, and CD107a; IFNγ, IL8, and CD107a; IL17A, TNF, and IL8; IL17A, TNF, and CD107a; IL17A, IL8, and CD107a; TNF, IL8, and CD107a; IL2, IFNγ, IL17A, and TNF; IL2, IFNγ, IL17A, and IL8; IL2, IFNγ, IL17A, and CD107a; IL2, IFNγ, TNF, and IL8; IL2, IFNγ, TNF, and CD107a; IL2, IFNγ, IL8, and CD107a; IL2, IL17A, TNF, and IL8; IL2, IL17A, TNF, and CD107a; IL2, IL17A, IL8, and CD107a; IL2, TNF, IL8, and CD107a; IFNγ, IL17A, TNF, and IL8; IFNγ, IL17A, TNF, and CD107a; IFNγ, IL17A, IL8, and CD107a; IFNγ, TNF, IL8, and CD107a; IL17A, TNF, IL8, and CD107a; IL2, IFNγ, IL17A, TNF, and IL8; IL2, IFNγ, IL17A, TNF, and CD107a; IL2, IFNγ, IL17A, IL8, and CD107a; IL2, IFNγ, TNF, IL8, and CD107a; IL2, IFNγ, IL17A, TNF, IL8, and CD107a; IL2, IL17A, TNF, IL8, and CD107a; or IFNγ, IL17A, TNF, IL8, and CD107a.

7. The method of claim 1, comprising determining the intracellular level of each protein comprising the signature.

8. The method of claim 1, comprising:
activating the CAR-expressing cells in the sample in vitro, and
culturing the CAR-expressing cells in the presence of one or more protein transport inhibitor.

9. The method of claim 8, wherein activating comprises culturing the CAR-expressing cells with an activating agent.

10. The method of claim 1, wherein the signature is determined using fluorescence-activated cell sorting (FACS).

11. The method of claim 1, comprising
activating the CAR-expressing cells in the sample in vitro,
culturing the CAR-expressing cells in the presence of a protein transport inhibitor, and
determining the intracellular level of each protein comprising the signature, to thereby acquire the signature.

12-16. (canceled)

17. The method of claim 1, wherein the CAR cells are manufactured from from an apheresis sample acquired from the subject, wherein optionally the apheresis sample is evaluated prior to manufacturing the CAR cells from the apheresis sample, after manufacturing the CAR cells from the apheresis sample, or both.

18. The method of claim 1, wherein the CAR targets CD19 or BCMA.

19. (canceled)

20. The method of claim 1, wherein the signature is determined prior to, during, or after administering the manufactured CAR-expressing cell composition to the subject.

21. The method of claim 1, wherein the cancer is a hematological cancer.

22. The method of claim 21, wherein the hematological cancer is leukemia or lymphoma.

23. The method of claim 21, wherein the hematological cancer is selected from the group consisting of B-cell acute lymphocytic leukemia (B-ALL), T-cell acute lymphocytic leukemia (T-ALL), acute lymphocytic leukemia (ALL) (e.g., pediatric ALL), chronic myelogenous leukemia (CML), chronic lymphocytic leukemia (CLL), B cell promyelocytic leukemia, blastic plasmacytoid dendritic cell neoplasm, Burkitt's lymphoma, diffuse large B cell lymphoma, follicular lymphoma, hairy cell leukemia, small cell- or a large cell-follicular lymphoma, malignant lymphoproliferative conditions, MALT lymphoma, mantle cell lymphoma, marginal zone lymphoma, multiple myeloma, myelodysplasia and myelodysplastic syndrome, non-Hodgkin lymphoma, Hodgkin lymphoma, plasmablastic lymphoma, plasmacytoid dendritic cell neoplasm, and Waldenstrom macroglobulinemia.

24. (canceled)

25. The method of claim 21, wherein the hematological cancer is pediatric ALL.

26. The method of claim 1, wherein the subject is a human patient.

27-31. (canceled)

The application's sequence listing, which the Patent Office published only in electronic form, follows.

SEQUENCE LISTING (1220 sequences)

SEQ ID NO: 1 - DNA, 1184 bp, Artificial Sequence
  Description of Artificial Sequence: Synthetic polynucleotide
cgtgaggctccggtgcccgtcagtgggcagagcgcacatcgcccacagtccccgagaagttggggggaggggtcggcaattgaaccggtgcctagagaaggtggcgcggggtaaactgggaaagtgatgtcgtgtactggctccgcctttttcccgagggtgggggagaaccgtatataagtgcagtagtcgccgtgaacgttctttttcgcaacgggtttgccgccagaacacaggtaagtgccgtgtgtggttcccgcgggcctggcctctttacgggttatggcccttgcgtgccttgaattacttccacctggctgcagtacgtgattcttgatcccgagcttcgggttggaagtgggtgggagagttcgaggccttgcgcttaaggagccccttcgcctcgtgcttgagttgaggcctggcctgggcgctggggccgccgcgtgcgaatctggtggcaccttcgcgcctgtctcgctgctttcgataagtctctagccatttaaaatttttgatgacctgctgcgacgctttttttctggcaagatagtcttgtaaatgcgggccaagatctgcacactggtatttcggtttttggggccgcgggcggcgacggggcccgtgcgtcccagcgcacatgttcggcgaggcggggcctgcgagcgcggccaccgagaatcggacgggggtagtctcaagctggccggcctgctctggtgcctggcctcgcgccgccgtgtatcgccccgccctgggcggcaaggctggcccggtcggcaccagttgcgtgagcggaaagatggccgcttcccggccctgctgcagggagctcaaaatggaggacgcggcgctcgggagagcgggcgggtgagtcacccacacaaaggaaaagggcctttccgtcctcagccgtcgcttcatgtgactccacggagtaccgggcgccgtccaggcacctcgattagttctcgagcttttggagtacgtcgtctttaggttggggggaggggttttatgcgatggagtttccccacactgagtgggtggagactgaagttaggccagcttggcacttgatgtaattctccttggaatttgccctttttgagtttggatcttggttcattctcaagcctcagacagtggttcaaagtttttttcttccatttcaggtgtcgtga

SEQ ID NO: 2 - protein, 21 aa, Artificial Sequence
  Description of Artificial Sequence: Synthetic peptide
MALPVTALLLPLALLLHAARP

SEQ ID NO: 3 - DNA, 63 bp, Artificial Sequence
  Description of Artificial Sequence: Synthetic oligonucleotide
atggccctgcctgtgacagccctgctgctgcctctggctctgctgctgcatgccgctagaccc

SEQ ID NO: 4 - protein, 45 aa, Artificial Sequence
  Description of Artificial Sequence: Synthetic polypeptide
TTTPAPRPPTPAPTIASQPLSLRPEACRPAAGGAVHTRGLDFACD

SEQ ID NO: 5 - DNA, 135 bp, Artificial Sequence
  Description of Artificial Sequence: Synthetic polynucleotide
accacgacgccagcgccgcgaccaccaacaccggcgcccaccatcgcgtcgcagcccctgtccctgcgcccagaggcgtgccggccagcggcggggggcgcagtgcacacgagggggctggacttcgcctgtgat

SEQ ID NO: 6 - protein, 230 aa, Artificial Sequence
  Description of Artificial Sequence: Synthetic polypeptide
ESKYGPPCPPCPAPEFLGGPSVFLFPPKPKDTLMISRTPEVTCVVVDVSQEDPEVQFNWYVDGVEVHNAKTKPREEQFNSTYRVVSVLTVLHQDWLNGKEYKCKVSNKGLPSSIEKTISKAKGQPREPQVYTLPPSQEEMTKNQVSLTCLVKGFYPSDIAVEWESNGQPENNYKTTPPVLDSDGSFFLYSRLTVDKSRWQEGNVFSCSVMHEALHNHYTQKSLSLSLGKM

SEQ ID NO: 7 - DNA, 690 bp, Artificial Sequence
  Description of Artificial Sequence: Synthetic polynucleotide
gagagcaagtacggccctccctgccccccttgccctgcccccgagttcctgggcggacccagcgtgttcctgttcccccccaagcccaaggacaccctgatgatcagccggacccccgaggtgacctgtgtggtggtggacgtgtcccaggaggaccccgaggtccagttcaactggtacgtggacggcgtggaggtgcacaacgccaagaccaagccccgggaggagcagttcaatagcacctaccgggtggtgtccgtgctgaccgtgctgcaccaggactggctgaacggcaaggaatacaagtgtaaggtgtccaacaagggcctgcccagcagcatcgagaaaaccatcagcaaggccaagggccagcctcgggagccccaggtgtacaccctgccccctagccaagaggagatgaccaagaaccaggtgtccctgacctgcctggtgaagggcttctaccccagcgacatcgccgtggagtgggagagcaacggccagcccgagaacaactacaagaccaccccccctgtgctggacagcgacggcagcttcttcctgtacagccggctgaccgtggacaagagccggtggcaggagggcaacgtctttagctgctccgtgatgcacgaggccctgcacaaccactacacccagaagagcctgagcctgtccctgggcaagatg

SEQ ID NO: 8 - protein, 282 aa, Artificial Sequence
  Description of Artificial Sequence: Synthetic polypeptide
RWPESPKAQASSVPTAQPQAEGSLAKATTAPATTRNTGRGGEEKKKEKEKEEQEERETKTPECPSHTQPLGVYLLTPAVQDLWLRDKATFTCFVVGSDLKDAHLTWEVAGKVPTGGVEEGLLERHSNGSQSQHSRLTLPRSLWNAGTSVTCTLNHPSLPPQRLMALREPAAQAPVKLSLNLLASSDPPEAASWLLCEVSGFSPPNILLMWLEDQREVNTSGFAPARPPPQPGSTTFWAWSVLRVPAPPSPQPATYTCVVSHEDSRTLLNASRSLEVSYVTDH

SEQ ID NO: 9 - DNA, 847 bp, Artificial Sequence
  Description of Artificial Sequence: Synthetic polynucleotide
aggtggcccgaaagtcccaaggcccaggcatctagtgttcctactgcacagccccaggcagaaggcagcctagccaaagctactactgcacctgccactacgcgcaatactggccgtggcggggaggagaagaaaaaggagaaagagaaagaagaacaggaagagagggagaccaagacccctgaatgtccatcccatacccagccgctgggcgtctatctcttgactcccgcagtacaggacttgtggcttagagataaggccacctttacatgtttcgtcgtgggctctgacctgaaggatgcccatttgacttgggaggttgccggaaaggtacccacagggggggttgaggaagggttgctggagcgccattccaatggctctcagagccagcactcaagactcacccttccgagatccctgtggaacgccgggacctctgtcacatgtactctaaatcatcctagcctgcccccacagcgtctgatggcccttagagagccagccgcccaggcaccagttaagcttagcctgaatctgctcgccagtagtgatcccccagaggccgccagctggctcttatgcgaagtgtccggctttagcccgcccaacatcttgctcatgtggctggaggaccagcgagaagtgaacaccagcggcttcgctccagcccggcccccaccccagccgggttctaccacattctgggcctggagtgtcttaagggtcccagcaccacctagcccccagccagccacatacacctgtgttgtgtcccatgaagatagcaggaccctgctaaatgcttctaggagtctggaggtttcctacgtgactgaccatt

SEQ ID NO: 10 - protein, 10 aa, Artificial Sequence
  Description of Artificial Sequence: Synthetic peptide
GGGGSGGGGS

SEQ ID NO: 11 - DNA, 30 bp, Artificial Sequence
  Description of Artificial Sequence: Synthetic oligonucleotide
ggtggcggaggttctggaggtggaggttcc

SEQ ID NO: 12 - protein, 24 aa, Artificial Sequence
  Description of Artificial Sequence: Synthetic peptide
IYIWAPLAGTCGVLLLSLVITLYC

SEQ ID NO: 13 - DNA, 72 bp, Artificial Sequence
  Description of Artificial Sequence: Synthetic oligonucleotide
atctacatctgggcgcccttggccgggacttgtggggtccttctcctgtcactggttatcaccctttactgc

SEQ ID NO: 14 - protein, 42 aa, Homo sapiens
KRGRKKLLYIFKQPFMRPVQTTQEEDGCSCRFPEEEEGGCEL

SEQ ID NO: 15 - DNA, 126 bp, Homo sapiens
aaacggggcagaaagaaactcctgtatatattcaaacaaccatttatgagaccagtacaaactactcaagaggaagatggctgtagctgccgatttccagaagaagaagaaggaggatgtgaactg

SEQ ID NO: 16 - protein, 48 aa, Artificial Sequence
  Description of Artificial Sequence: Synthetic polypeptide
QRRKYRSNKGESPVEPAEPCRYSCPREEEGSTIPIQEDYRKPEPACSP

SEQ ID NO: 17 - DNA, 123 bp, Artificial Sequence
  Description of Artificial Sequence: Synthetic polynucleotide
aggagtaagaggagcaggctcctgcacagtgactacatgaacatgactccccgccgccccgggcccacccgcaagcattaccagccctatgccccaccacgcgacttcgcagcctatcgctcc

SEQ ID NO: 18 - protein, 112 aa, Artificial Sequence
  Description of Artificial Sequence: Synthetic polypeptide
RVKFSRSADAPAYKQGQNQLYNELNLGRREEYDVLDKRRGRDPEMGGKPRRKNPQEGLYNELQKDKMAEAYSEIGMKGERRRGKGHDGLYQGLSTATKDTYDALHMQALPPR

SEQ ID NO: 19 - DNA, 336 bp, Artificial Sequence
  Description of Artificial Sequence: Synthetic polynucleotide
agagtgaagttcagcaggagcgcagacgcccccgcgtacaagcagggccagaaccagctctataacgagctcaatctaggacgaagagaggagtacgatgttttggacaagagacgtggccgggaccctgagatggggggaaagccgagaaggaagaaccctcaggaaggcctgtacaatgaactgcagaaagataagatggcggaggcctacagtgagattgggatgaaaggcgagcgccggaggggcaaggggcacgatggcctttaccagggtctcagtacagccaccaaggacacctacgacgcccttcacatgcaggccctgccccctcgc

SEQ ID NO: 20 - protein, 112 aa, Homo sapiens
RVKFSRSADAPAYQQGQNQLYNELNLGRREEYDVLDKRRGRDPEMGGKPRRKNPQEGLYNELQKDKMAEAYSEIGMKGERRRGKGHDGLYQGLSTATKDTYDALHMQALPPR

SEQ ID NO: 21 - DNA, 336 bp, Homo sapiens
agagtgaagttcagcaggagcgcagacgcccccgcgtaccagcagggccagaaccagctctataacgagctcaatctaggacgaagagaggagtacgatgttttggacaagagacgtggccgggaccctgagatggggggaaagccgagaaggaagaaccctcaggaaggcctgtacaatgaactgcagaaagataagatggcggaggcctacagtgagattgggatgaaaggcgagcgccggaggggcaaggggcacgatggcctttaccagggtctcagtacagccaccaaggacacctacgacgcccttcacatgcaggccctgccccctcgc

SEQ ID NO: 22 - protein, 5 aa, Artificial Sequence
  Description of Artificial Sequence: Synthetic peptide
GGGGS

SEQ ID NO: 23 - DNA, 30 bp, Artificial Sequence; identical to SEQ ID NO: 11
  Description of Artificial Sequence: Synthetic oligonucleotide

SEQ ID NO: 24-27 - skipped (4 entries)

SEQ ID NO: 28 - protein, 40 aa, Artificial Sequence
  Description of Artificial Sequence: Synthetic polypeptide
  MISC_FEATURE (1)..(40): This sequence may encompass 1-10 "Gly Gly Gly Ser" repeating units
  See specification as filed for detailed description of substitutions and preferred embodiments
GGGSGGGSGGGSGGGSGGGSGGGSGGGSGGGSGGGSGGGS

SEQ ID NO: 29 - protein, 20 aa, Artificial Sequence
  Description of Artificial Sequence: Synthetic peptide
GGGGSGGGGSGGGGSGGGGS

SEQ ID NO: 30 - protein, 15 aa, Artificial Sequence
  Description of Artificial Sequence: Synthetic peptide
GGGGSGGGGSGGGGS

SEQ ID NO: 31 - protein, 4 aa, Artificial Sequence
  Description of Artificial Sequence: Synthetic peptide
GGGS

SEQ ID NO: 32 - RNA, 2000 nt, Artificial Sequence
  Description of Artificial Sequence: Synthetic polynucleotide
aaaaaaaaaaaaaaaaaaaaaaaaaaaaaaaaaaaaaaaaaaaaaaaaaaaaaaaaaaaaaaaaaaaaaaaaaaaaaaaaaaaaaaaaaaaaaaaaaaaaaaaaaaaaaaaaaaaaaaaaaaaaaaaaaaaaaaaaaaaaaaaaaaaaaaaaaaaaaaaaaaaaaaaaaaaaaaaaaaaaaaaaaaaaaaaaaaaaaaaaaaaaaaaaaaaaaaaaaaaaaaaaaaaaaaaaaaaaaaaaaaaaaaaaaaaaaaaaaaaaaaaaaaaaaaaaaaaaaaaaaaaaaaaaaaaaaaaaaaaaaaaaaaaaaaaaaaaaaaaaaaaaaaaaaaaaaaaaaaaaaaaaaaaaaaaaaaaaaaaaaaaaaaaaaaaaaaaaaaaaaaaaaaaaaaaaaaaaaaaaaaaaaaaaaaaaaaaaaaaaaaaaaaaaaaaaaaaaaaaaaaaaaaaaaaaaaaaaaaaaaaaaaaaaaaaaaaaaaaaaaaaaaaaaaaaaaaaaaaaaaaaaaaaaaaaaaaaaaaaaaaaaaaaaaaaaaaaaaaaaaaaaaaaaaaaaaaaaaaaaaaaaaaaaaaaaaaaaaaaaaaaaaaaaaaaaaaaaaaaaaaaaaaaaaaaaaaaaaaaaaaaaaaaaaaaaaaaaaaaaaaaaaaaaaaaaaaaaaaaaaaaaaaaaaaaaaaaaaaaaaaaaaaaaaaaaaaaaaaaaaaaaaaaaaaaaaaaaaaaaaaaaaaaaaaaaaaaaaaaaaaaaaaaaaaaaaaaaaaaaaaaaaaaaaaaaaaaaaaaaaaaaaaaaaaaaaaaaaaaaaaaaaaaaaaaaaaaaaaaaaaaaaaaaaaaaaaaaaaaaaaaaaaaaaaaaaaaaaaaaaaaaaaaaaaaaaaaaaaaaaaaaaaaaaaaaaaaaaaaaaaaaaaaaaaaaaaaaaaaaaaaaaaaaaaaaaaaaaaaaaaaaaaaaaaaaaaaaaaaaaaaaaaaaaaaaaaaaaaaaaaaaaaaaaaaaaaaaaaaaaaaaaaaaaaaaaaaaaaaaaaaaaaaaaaaaaaaaaaaaaaaaaaaaaaaaaaaaaaaaaaaaaaaaaaaaaaaaaaaaaaaaaaaaaaaaaaaaaaaaaaaaaaaaaaaaaaaaaaaaaaaaaaaaaaaaaaaaaaaaaaaaaaaaaaaaaaaaaaaaaaaaaaaaaaaaaaaaaaaaaaaaaaaaaaaaaaaaaaaaaaaaaaaaaaaaaaaaaaaaaaaaaaaaaaaaaaaaaaaaaaaaaaaaaaaaaaaaaaaaaaaaaaaaaaaaaaaaaaaaaaaaaaaaaaaaaaaaaaaaaaaaaaaaaaaaaaaaaaaaaaaaaaaaaaaaaaaaaaaaaaaaaaaaaaaaaaaaaaaaaaaaaaaaaaaaaaaaaaaaaaaaaaaaaaaaaaaaaaaaaaaaaaaaaaaaaaaaaaaaaaaaaaaaaaaaaaaaaaaaaaaaaaaaaaaaaaaaaaaaaaaaaaaaaaaaaaaaaaaaaaaaaaaaaaaaaaaaaaaaaaaaaaaaaaaaaaaaaaaaaaaaaaaaaaaaaaaaaaaaaaaaaaaaaaaaaaaaaaaaaaaaaaaaaaaaaaaaaaaaaaaaaaaaaaaaaaaaaaaaaaaaaaaaaaaaaaaaaaaaaaaaaaaaaaaaaaaaaaaaaaaaaaaaaaaaaaaaaaaaaaaaaaaaaaaaaaaaaaaaaaaaaaaaaaaaaaaaaaaaaaaaaaaaaaaaaaaaaaaaaaaaaaaaaaaaaaaaaaaaaaaaaaaaaaaaaaaaaaaaaaaaaaaaaaaaaaaaaaaaaaaaaaaaaaaaaaaaaaaaaaaaaaaaaaaaaaaaaaaaaaaaaaaaaaaaaaaaaaaaaaaaaaaaaaaaaaaaaaaaaaaaaaaaaaaaaaaaaaaaaaaaaaaaaaaaaaaaaaaaaaaaaaaaaaaaaaaaaaaaaaaaaaaaaaaaaaaaaaaaaaaaaaaaaaaaaaaaaaaaaaaaaaaaaaaaaaaaaaaaaaaaaaaaaaaaaaaaaaaa

SEQ ID NO: 33 - RNA, 150 nt, Artificial Sequence
  Description of Artificial Sequence: Synthetic polynucleotide
aaaaaaaaaaaaaaaaaaaaaaaaaaaaaaaaaaaaaaaaaaaaaaaaaaaaaaaaaaaaaaaaaaaaaaaaaaaaaaaaaaaaaaaaaaaaaaaaaaaaaaaaaaaaaaaaaaaaaaaaaaaaaaaaaaaaaaaaaaaaaaaaaaaaaa

SEQ ID NO: 34 - RNA, 5000 nt, Artificial Sequence
  Description of Artificial Sequence: Synthetic polynucleotide
aaaaaaaaaaaaaaaaaaaaaaaaaaaaaaaaaaaaaaaaaaaaaaaaaaaaaaaaaaaaaaaaaaaaaaaaaaaaaaaaaaaaaaaaaaaaaaaaaaaaaaaaaaaaaaaaaaaaaaaaaaaaaaaaaaaaaaaaaaaaaaaaaaaaaaaaaaaaaaaaaaaaaaaaaaaaaaaaaaaaaaaaaaaaaaaaaaaaaaaaaaaaaaaaaaaaaaaaaaaaaaaaaaaaaaaaaaaaaaaaaaaaaaaaaaaaaaaaaaaaaaaaaaaaaaaaaaaaaaaaaaaaaaaaaaaaaaaaaaaaaaaaaaaaaaaaaaaaaaaaaaaaaaaaaaaaaaaaaaaaaaaaaaaaaaaaaaaaaaaaaaaaaaaaaaaaaaaaaaaaaaaaaaaaaaaaaaaaaaaaaaaaaaaaaaaaaaaaaaaaaaaaaaaaaaaaaaaaaaaaaaaaaaaaaaaaaaaaaaaaaaaaaaaaaaaaaaaaaaaaaaaaaaaaaaaaaaaaaaaaaaaaaaaaaaaaaaaaaaaaaaaaaaaaaaaaaaaaaaaaaaaaaaaaaaaaaaaaaaaaaaaaaaaaaaaaaaaaaaaaaaaaaaaaaaaaaaaaaaaaaaaaaaaaaaaaaaaaaaaaaaaaaaaaaaaaaaaaaaaaaaaaaaaaaaaaaaaaaaaaaaaaaaaaaaaaaaaaaaaaaaaaaaaaaaaaaaaaaaaaaaaaaaaaaaaaaaaaaaaaaaaaaaaaaaaaaaaaaaaaaaaaaaaaaaaaaaaaaaaaaaaaaaaaaaaaaaaaaaaaaaaaaaaaaaaaaaaaaaaaaaaaaaaaaaaaaaaaaaaaaaaaaaaaaaaaaaaaaaaaaaaaaaaaaaaaaaaaaaaaaaaaaaaaaaaaaaaaaaaaaaaaaaaaaaaaaaaaaaaaaaaaaaaaaaaaaaaaaaaaaaaaaaaaaaaaaaaaaaaaaaaaaaaaaaaaaaaaaaaaaaaaaaaaaaaaaaaaaaaaaaaaaaaaaaaaaaaaaaaaaaaaaaaaaaaaaaaaaaaaaaaaaaaaaaaaaaaaaaaaaaaaaaaaaaaaaaaaaaaaaaaaaaaaaaaaaaaaaaaaaaaaaaaaaaaaaaaaaaaaaaaaaaaaaaaaaaaaaaaaaaaaaaaaaaaaaaaaaaaaaaaaaaaaaaaaaaaaaaaaaaaaaaaaaaaaaaaaaaaaaaaaaaaaaaaaaaaaaaaaaaaaaaaaaaaaaaaaaaaaaaaaaaaaaaaaaaaaaaaaaaaaaaaaaaaaaaaaaaaaaaaaaaaaaaaaaaaaaaaaaaaaaaaaaaaaaaaaaaaaaaaaaaaaaaaaaaaaaaaaaaaaaaaaaaaaaaaaaaaaaaaaaaaaaaaaaaaaaaaaaaaaaaaaaaaaaaaaaaaaaaaaaaaaaaaaaaaaaaaaaaaaaaaaaaaaaaaaaaaaaaaaaaaaaaaaaaaaaaaaaaaaaaaaaaaaaaaaaaaaaaaaaaaaaaaaaaaaaaaaaaaaaaaaaaaaaaaaaaaaaaaaaaaaaaaaaaaaaaaaaaaaaaaaaaaaaaaaaaaaaaaaaaaaaaaaaaaaaaaaaaaaaaaaaaaaaaaaaaaaaaaaaaaaaaaaaaaaaaaaaaaaaaaaaaaaaaaaaaaaaaaaaaaaaaaaaaaaaaaaaaaaaaaaaaaaaaaaaaaaaaaaaaaaaaaaaaaaaaaaaaaaaaaaaaaaaaaaaaaaaaaaaaaaaaaaaaaaaaaaaaaaaaaaaaaaaaaaaaaaaaaaaaaaaaaaaaaaaaaaaaaaaaaaaaaaaaaaaaaaaaaaaaaaaaaaaaaaaaaaaaaaaaaaaaaaaaaaaaaaaaaaaaaaaaaaaaaaaaaaaaaaaaaaaaaaaaaaaaaaaaaaaaaaaaaaaaaaaaaaaaaaaaaaaaaaaaaaaaaaaaaaaaaaaaaaaaaaaaaaaaaaaaaaaaaaaaaaaaaaaaaaaaaaaaaaaaaaaaaaaaaaaaaaaaaaaaaaaaaaaaaaaaaaaaaaaaaaaaaaaaaaaaaaaaaaaaaaaaaaaaaaaaaaaaaaaaaaaaaaaaaaaaaaaaaaaaaaaaaaaaaaaaaaaaaaaaaaaaaaaaaaaaaaaaaaaaaaaaaaaaaaaaaaaaaaaaaaaaaaaaaaaaaaaaaaaaaaaaaaaaaaaaaaaaaaaaaaaaaaaaaaaaaaaaaaaaaaaaaaaaaaaaaaaaaaaaaaaaaaaaaaaaaaaaaaaaaaaaaaaaaaaaaaaaaaaaaaaaaaaaaaaaaaaaaaaaaaaaaaaaaaaaaaaaaaaaaaaaaaaaaaaaaaaaaaaaaaaaaaaaaaaaaaaaaaaaaaaaaaaaaaaaaaaaaaaaaaaaaaaaaaaaaaaaaaaaaaaaaaaaaaaaaaaaaaaaaaaaaaaaaaaaaaaaaaaaaaaaaaaaaaaaaaaaaaaaaaaaaaaaaaaaaaaaaaaaaaaaaaaaaaaaaaaaaaaaaaaaaaaaaaaaaaaaaaaaaaaaaaaaaaaaaaaaaaaaaaaaaaaaaaaaaaaaaaaaaaaaaaaaaaaaaaaaaaaaaaaaaaaaaaaaaaaaaaaaaaaaaaaaaaaaaaaaaaaaaaaaaaaaaaaaaaaaaaaaaaaaaaaaaaaaaaaaaaaaaaaaaaaaaaaaaaaaaaaaaaaaaaaaaaaaaaaaaaaaaaaaaaaaaaaaaaaaaaaaaaaaaaaaaaaaaaaaaaaaaaaaaaaaaaaaaaaaaaaaaaaaaaaaaaaaaaaaaaaaaaaaaaaaaaaaaaaaaaaaaaaaaaaaaaaaaaaaaaaaaaaaaaaaaaaaaaaaaaaaaaaaaaaaaaaaaaaaaaaaaaaaaaaaaaaaaaaaaaaaaaaaaaaaaaaaaaaaaaaaaaaaaaaaaaaaaaaaaaaaaaaaaaaaaaaaaaaaaaaaaaaaaaaaaaaaaaaaaaaaaaaaaaaaaaaaaaaaaaaaaaaaaaaaaaaaaaaaaaaaaaaaaaaaaaaaaaaaaaaaaaaaaaaaaaaaaaaaaaaaaaaaaaaaaaaaaaaaaaaaaaaaaaaaaaaaaaaaaaaaaaaaaaaaaaaaaaaaaaaaaaaaaaaaaaaaaaaaaaaaaaaaaaaaaaaaaaaaaaaaaaaaaaaaaaaaaaaaaaaaaaaaaaaaaaaaaaaaaaaaaaaaaaaaaaaaaaaaaaaaaaaaaaaaaaaaaaaaaaaaaaaaaaaaaaaaaaaaaaaaaaaaaaaaaaaaaaaaaaaaaaaaaaaaaaaaaaaaaaaaaaaaaaaaaaaaaaaaaaaaaaaaaaaaaaaaaaaaaaaaaaaaaaaaaaaaaaaaaaaaaaaaaaaaaaaaaaaaaaaaaaaaaaaaaaaaaaaaaaaaaaaaaaaaaaaaaaaaaaaaaaaaaaaaaaaaaaaaaaaaaaaaaaaaaaaaaaaaaaaaaaaaaaaaaaaaaaaaaaaaaaaaaaaaaaaaaaaaaaaaaaaaaaaaaaaaaaaaaaaaaaaaaaaaaaaaaaaaaaaaaaaaaaaaaaaaaaaaaaaaaaaaaaaaaaaaaaaaaaaaaaaaaaaaaaaaaaaaaaaaaaaaaaaaaaaaaaaaaaaaaaaaaaaaaaaaaaaaaaaaaaaaaaaaaaaaaaaaaaaaaaaaaaaaaaaaaaaaaaaaaaaaaaaaaaaaaaaaaaaaaaaaaaaaaaaaaaaaaaaaaaaaaaaaaaaaaaaaaaaaaaaaaaaaaaaaaaaaaaaaaaaaaaaaaaaaaaaaaaaaaaaaaaaaaaaaaaaaaaaaaaaaaaaaaaaaaaaaaaaaaaaaaaaaaaaaaaaaaaaaaaaaaaaaaaaaaaaaaaaaaaaaaaaaaaaaaaaaaaaaaaaaaaaaaaaaaaaaaaaaaaaaaaaaaaaaaaaaaaaaaaaaaaaaaaaaaaaaaaaaaaaaaaaaaaaaaaaaaaaaaaaaaaaaaaaaaaaaaaaaaaaaaaaaaaaaaaaaaaaaaaaaaaaaaaaaaaaaaaaaaaaaaaaaaaaaaaaaaaaaaaaaaaaaaaaaaaaaaaaaaaaaaaaaaaaaaaaaaaaaaaaaaaaaaaaaaaaaaaaaaaaaaaaaaaaaaaaaaaaaaaaaaaaaaaaaaaaaaaaaaaaaaaaaaaaaaaaaaaaaaaaaaaaaaaaaaaaaaaaaaaaaaaaaaaaaaaaaaaaaaaaaaaaaaaaaaaaaaaaaaaaaaaaaaaaaaaaaaaaaaaaaaaaaaaaaaaaaaaaaaaaaaaaaaaaaaaaaaaaaaaaaaaaaaaaaaaaaaaaaaaaaaaaaaaaaaaaaaaaaaaaaaaaaaaaaaaaaaaaaaaaaaaaaaaaaaaaaaaaaaaaaaaaaaaaaaaaaaaaaaaaaaaaaaaaaaaaaaaaaaaaaaaaaaaaaaaaaaaaaaaaaaaaaaaaaaaaaaaaaaaaaaaaaaaaaaaaaaaaaaaaaaaaaaaaaaaaaaaaaaaaaaaaaaaaaaaaaaaaaaaaaaaaaaaaaaaaaaaaaaaaaaaaaaaaaaaaaaaaaaaaaaaaaaaaaaaaaaaaaaaaaaaaaaaaaaaaaaaaaaaaaaaaaaaaaaaaaaaaaaaaaaaaaaaaaaaaaaaaaaaaaaaaaaaaaaaaaaaaaaaaaaaaaaaaaaaaaaaaaaaaaaaaaaaaaaaaaaaaaaaaaaaaaaaaaaaaaaaaaaaaaaaaaaaaaaaaaaaaaaaaaaaaaaaaaaaaaaaaaaaaaaaaaaaaaaaaaaaaaaaaaaaaaaaaaaaaaaaaaaaaaaaaaaaaaaaaaaaaaaaaaaaaaaaaaaaaaaaaaaaaaaaaaaaaaaaaaaaaaaaaaaaaaaaaaaaaaaaaaaaaaaaaaaaaaaaaaaaaaaaaaaaaaaaaaaaaaaaaaaaaaaaaaaaaaaaaaaaaaaaaaaaaaaaaaaaaaaaaaaaaaaaaaaaaaaaaaaaaaaaaaaaaaaaaaaaaaaaaaaaaaaaaaaaaaaaaaaaaaaaaaaaaaaaaaaaaaaaaaaaaaaaaaaaaaaaaaaaaaaaaaaaaaaaaaaaaaaaaaaaaaaa

SEQ ID NO: 35 - DNA, 100 bp, Artificial Sequence
  Description of Artificial Sequence: Synthetic polynucleotide
tttttttttttttttttttttttttttttttttttttttttttttttttttttttttttttttttttttttttttttttttttttttttttttttttttt

SEQ ID NO: 36 - DNA, 5000 bp, Artificial Sequence
  Description of Artificial Sequence: Synthetic polynucleotide
tttttttttttttttttttttttttttttttttttttttttttttttttttttttttttttttttttttttttttttttttttttttttttttttttttttttttttttttttttttttttttttttttttttttttttttttttttttttttttttttttttttttttttttttttttttttttttttttttttttttttttttttttttttttttttttttttttttttttttttttttttttttttttttttttttttttttttttttttttttttttttttttttttttttttttttttttttttttttttttttttttttttttttttttttttttttttttttttttttttttttttttttttttttttttttttttttttttttttttttttttttttttttttttttttttttttttttttttttttttttttttttttttttttttttttttttttttttttttttttttttttttttttttttttttttttttttttttttttttttttttttttttttttttttttttttttttttttttttttttttttttttttttttttttttttttttttttttttttttttttttttttttttttttttttttttttttttttttttttttttttttttttttttttttttttttttttttttttttttttttttttttttttttttttttttttttttttttttttttttttttttttttttttttttttttttttttttttttttttttttttttttttttttttttttttttttttttttttttttttttttttttttttttttttttttttttttttttttttttttttttttttttttttttttttttttttttttttttttttttttttttttttttttttttttttttttttttttttttttttttttttttttttttttttttttttttttttttttttttttttttttttttttttttttttttttttttttttttttttttttttttttttttttttttttttttttttttttttttttttttttttttttttttttttttttttttttttttttttttttttttttttttttttttttttttttttttttttttttttttttttttttttttttttttttttttttttttttttttttttttttttttttttttttttttttttttttttttttttttttttttttttttttttttttttttttttttttttttttttttttttttttttttttttttttttttttttttttttttttttttttttttttttttttttttttttttttttttttttttttttttttttttttttttttttttttttttttttttttttttttttttttttttttttttttttttttttttttttttttttttttttttttttttttttttttttttttttttttttttttttttttttttttttttttttttttttttttttttttttttttttttttttttttttttttttttttttttttttttttttttttttttttttttttttttttttttttttttttttttttttttttttttttttttttttttttttttttttttttttttttttttttttttttttttttttttttttttttttttttttttttttttttttttttttttttttttttttttttttttttttttttttttttttttttttttttttttttttttttttttttttttttttttttttttttttttttttttttttttttttttttttttttttttttttttttttttttttttttttttttttttttttttttttttttttttttttttttttttttttttttttttttttttttttttttttttttttttttttttttttttttttttttttttttttttttttttttttttttttttttttttttttttttttttttttttttttttttttttttttttttttttttttttttttttttttttttttttttttttttttttttttttttttttttttttttttttttttttttttttttttttttttttttttttttttttttttttttttttttttttttttttttttttttttttttttttttttttttttttttttttttttttttttttttttttttttttttttttttttttttttttttttttttttttttttttttttttttttttttttttttttttttttttttttttttttttttttttttttttttttttttttttttttttttttttttttttttttttttttttttttttttttttttttttttttttttttttttttttttttttttttttttttttttttttttttttttttttttttttttttttttttttttttttttttttttttttttttttttttttttttttttttttttttttttttttttttttttttttttttttttttttttttttttttttttttttttttttttttttttttttttttttttttttttttttttttttttttttttttttttttttttttttttttttttttttttttttttttttttttttttttttttttttttttttttttttttttttttttttttttttttttttttttttttttttttttttttttttttttttttttttttttttttttttttttttttttttttttttttttttttttttttttttttttttttttttttttttttttttttttttttttttttttttttttttttttttttttttttttttttttttttttttttttttttttttttttttttttttttttttttttttttttttttttttttttttttttttttttttttttttttttttttttttttttttttttttttttttttttttttttttttttttttttttttttttttttttttttttttttttttttttttttttttttttttttttttttttttttttttttttttttttttttttttttttttttttttttttttttttttttttttttttttttttttttttttttttttttttttttttttttttttttttttttttttttttttttttttttttttttttttttttttttttttttttttttttttttttttttttttttttttttttttttttttttttttttttttttttttttttttttttttttttttttttttttttttttttttttttttttttttttttttttttttttttttttttttttttttttttttttttttttttttttttttttttttttttttttttttttttttttttttttttttttttttttttttttttttttttttttttttttttttttttttttttttttttttttttttttttttttttttttttttttttttttttttttttttttttttttttttttttttttttttttttttttttttttttttttttttttttttttttttttttttttttttttttttttttttttttttttttttttttttttttttttttttttttttttttttttttttttttttttttttttttttttttttttttttttttttttttttttttttttttttttttttttttttttttttttttttttttttttttttttttttttttttttttttttttttttttttttttttttttttttttttttttttttttttttttttttttttttttttttttttttttttttttttttttttttttttttttttttttttttttttttttttttttttttttttttttttttttttttttttttttttttttttttttttttttttttttttttttttttttttttttttttttttttttttttttttttttttttttttttttttttttttttttttttttttttttttttttttttttttttttttttttttttttttttttttttttttttttttttttttttttttttttttttttttttttttttttttttttttttttttttttttttttttttttttttttttttttttttttttttttttttttttttttttttttttttttttttttttttttttttttttttttttttttttttttttttttttttttttttttttttttttttttttttttttttttttttttttttttttttttttttttttttttttttttttttttttttttttttttttttttttttttttttttttttttttttttttttttttttttttttttttttttttttttttttttttttttttttttttttttttttttttttttttttttttttttttttttttttttttttttttttttttttttttttttttttttttttttttttttttttttttttttttttttttttttttttttttttttttttttttttttttttttttttttttttttttttttttttttttttttttttttttttttttttttttttttttttttttttttttttttttttttttttttttttttttttttttttttttttttttttttttttttttttttttttttttttttttttttttttttttttttttttttttttttttttttttttttttttttttttttttttttttttttttttttttttttttttttttttttttttttttttttttttttttttttttttttttttttttttttttttttttttttttttttttttttttttttttttttttttttttttttttttttttttttttttttttttttttttttttttttttttttttttttttttttttttttttttttttttttttttttttttttttttttttttttttttttttttttttttttttttttttttttttttttttttttttttttttttttttttttttttttttttttttttttttttttttttttttttttttttttttttttttttttttttttttttttttttttttttttttttttttttttttttttttttttttttttttttttttttttttttttttttttttttttt

SEQ ID NO: 37 - RNA, 64 nt, Artificial Sequence
  Description of Artificial Sequence: Synthetic oligonucleotide
aaaaaaaaaaaaaaaaaaaaaaaaaaaaaaaaaaaaaaaaaaaaaaaaaaaaaaaaaaaaaaaa

SEQ ID NO: 38 - RNA, 400 nt, Artificial Sequence
  Description of Artificial Sequence: Synthetic polynucleotide
aaaaaaaaaaaaaaaaaaaaaaaaaaaaaaaaaaaaaaaaaaaaaaaaaaaaaaaaaaaaaaaaaaaaaaaaaaaaaaaaaaaaaaaaaaaaaaaaaaaaaaaaaaaaaaaaaaaaaaaaaaaaaaaaaaaaaaaaaaaaaaaaaaaaaaaaaaaaaaaaaaaaaaaaaaaaaaaaaaaaaaaaaaaaaaaaaaaaaaaaaaaaaaaaaaaaaaaaaaaaaaaaaaaaaaaaaaaaaaaaaaaaaaaaaaaaaaaaaaaaaaaaaaaaaaaaaaaaaaaaaaaaaaaaaaaaaaaaaaaaaaaaaaaaaaaaaaaaaaaaaaaaaaaaaaaaaaaaaaaaaaaaaaaaaaaaaaaaaaaaaaaaaaaaaaaaaaaaaaaaaaaaaaaaaaaaaaaaaaaa

SEQ ID NO: 39 - protein, 486 aa, Artificial Sequence
  Description of Artificial Sequence: Synthetic polypeptide
MALPVTALLLPLALLLHAARPDIQMTQTTSSLSASLGDRVTISCRASQDISKYLNWYQQKPDGTVKLLIYHTSRLHSGVPSRFSGSGSGTDYSLTISNLEQEDIATYFCQQGNTLPYTFGGGTKLEITGGGGSGGGGSGGGGSEVKLQESGPGLVAPSQSLSVTCTVSGVSLPDYGVSWIRQPPRKGLEWLGVIWGSETTYYNSALKSRLTIIKDNSKSQVFLKMNSLQTDDTAIYYCAKHYYYGGSYAMDYWGQGTSVTVSSTTTPAPRPPTPAPTIASQPLSLRPEACRPAAGGAVHTRGLDFACDIYIWAPLAGTCGVLLLSLVITLYCKRGRKKLLYIFKQPFMRPVQTTQEEDGCSCRFPEEEEGGCELRVKFSRSADAPAYKQGQNQLYNELNLGRREEYDVLDKRRGRDPEMGGKPRRKNPQEGLYNELQKDKMAEAYSEIGMKGERRRGKGHDGLYQGLSTATKDTYDALHMQALPPR

SEQ ID NO: 40 - protein, 465 aa, Artificial Sequence
  Description of Artificial Sequence: Synthetic polypeptide
DIQMTQTTSSLSASLGDRVTISCRASQDISKYLNWYQQKPDGTVKLLIYHTSRLHSGVPSRFSGSGSGTDYSLTISNLEQEDIATYFCQQGNTLPYTFGGGTKLEITGGGGSGGGGSGGGGSEVKLQESGPGLVAPSQSLSVTCTVSGVSLPDYGVSWIRQPPRKGLEWLGVIWGSETTYYNSALKSRLTIIKDNSKSQVFLKMNSLQTDDTAIYYCAKHYYYGGSYAMDYWGQGTSVTVSSTTTPAPRPPTPAPTIASQPLSLRPEACRPAAGGAVHTRGLDFACDIYIWAPLAGTCGVLLLSLVITLYCKRGRKKLLYIFKQPFMRPVQTTQEEDGCSCRFPEEEEGGCELRVKFSRSADAPAYKQGQNQLYNELNLGRREEYDVLDKRRGRDPEMGGKPRRKNPQEGLYNELQKDKMAEAYSEIGMKGERRRGKGHDGLYQGLSTATKDTYDALHMQALPPR

SEQ ID NO: 41 - protein, 242 aa, Artificial Sequence
  Description of Artificial Sequence: Synthetic polypeptide
EIVMTQSPATLSLSPGERATLSCRASQDISKYLNWYQQKPGQAPRLLIYHTSRLHSGIPARFSGSGSGTDYTLTISSLQPEDFAVYFCQQGNTLPYTFGQGTKLEIKGGGGSGGGGSGGGGSQVQLQESGPGLVKPSETLSLTCTVSGVSLPDYGVSWIRQPPGKGLEWIGVIWGSETTYYSSSLKSRVTISKDNSKNQVSLKLSSVTAADTAVYYCAKHYYYGGSYAMDYWGQGTLVTVSS

SEQ ID NO: 42 - DNA, 813 bp, Artificial Sequence
  Description of Artificial Sequence: Synthetic polynucleotide
atggccctccctgtcaccgccctgctgcttccgctggctcttctgctccacgccgctcggcccgaaattgtgatgacccagtcacccgccactcttagcctttcacccggtgagcgcgcaaccctgtcttgcagagcctcccaagacatctcaaaataccttaattggtatcaacagaagcccggacaggctcctcgccttctgatctaccacaccagccggctccattctggaatccctgccaggttcagcggtagcggatctgggaccgactacaccctcactatcagctcactgcagccagaggacttcgctgtctatttctgtcagcaagggaacaccctgccctacacctttggacagggcaccaagctcgagattaaaggtggaggtggcagcggaggaggtgggtccggcggtggaggaagccaggtccaactccaagaaagcggaccgggtcttgtgaagccatcagaaactctttcactgacttgtactgtgagcggagtgtctctccccgattacggggtgtcttggatcagacagccaccggggaagggtctggaatggattggagtgatttggggctctgagactacttactactcttcatccctcaagtcacgcgtcaccatctcaaaggacaactctaagaatcaggtgtcactgaaactgtcatctgtgaccgcagccgacaccgccgtgtactattgcgctaagcattactattatggcgggagctacgcaatggattactggggacagggtactctggtcaccgtgtccagccaccaccatcatcaccatcaccat

SEQ ID NO: 43 - protein, 271 aa, Artificial Sequence
  Description of Artificial Sequence: Synthetic polypeptide
MALPVTALLLPLALLLHAARPEIVMTQSPATLSLSPGERATLSCRASQDISKYLNWYQQKPGQAPRLLIYHTSRLHSGIPARFSGSGSGTDYTLTISSLQPEDFAVYFCQQGNTLPYTFGQGTKLEIKGGGGSGGGGSGGGGSQVQLQESGPGLVKPSETLSLTCTVSGVSLPDYGVSWIRQPPGKGLEWIGVIWGSETTYYSSSLKSRVTISKDNSKNQVSLKLSSVTAADTAVYYCAKHYYYGGSYAMDYWGQGTLVTVSSHHHHHHHH

SEQ ID NO: 44 - DNA, 1458 bp, Artificial Sequence
  Description of Artificial Sequence: Synthetic polynucleotide
atggccctccctgtcaccgccctgctgcttccgctggctcttctgctccacgccgctcggcccgaaattgtgatgacccagtcacccgccactcttagcctttcacccggtgagcgcgcaaccctgtcttgcagagcctcccaagacatctcaaaataccttaattggtatcaacagaagcccggacaggctcctcgccttctgatctaccacaccagccggctccattctggaatccctgccaggttcagcggtagcggatctgggaccgactacaccctcactatcagctcactgcagccagaggacttcgctgtctatttctgtcagcaagggaacaccctgccctacacctttggacagggcaccaagctcgagattaaaggtggaggtggcagcggaggaggtgggtccggcggtggaggaagccaggtccaactccaagaaagcggaccgggtcttgtgaagccatcagaaactctttcactgacttgtactgtgagcggagtgtctctccccgattacggggtgtcttggatcagacagccaccggggaagggtctggaatggattggagtgatttggggctctgagactacttactactcttcatccctcaagtcacgcgtcaccatctcaaaggacaactctaagaatcaggtgtcactgaaactgtcatctgtgaccgcagccgacaccgccgtgtactattgcgctaagcattactattatggcgggagctacgcaatggattactggggacagggtactctggtcaccgtgtccagcaccactaccccagcaccgaggccacccaccccggctcctaccatcgcctcccagcctctgtccctgcgtccggaggcatgtagacccgcagctggtggggccgtgcatacccggggtcttgacttcgcctgcgatatctacatttgggcccctctggctggtacttgcggggtcctgctgctttcactcgtgatcactctttactgtaagcgcggtcggaagaagctgctgtacatctttaagcaacccttcatgaggcctgtgcagactactcaagaggaggacggctgttcatgccggttcccagaggaggaggaaggcggctgcgaactgcgcgtgaaattcagccgcagcgcagatgctccagcctacaagcaggggcagaaccagctctacaacgaactcaatcttggtcggagagaggagtacgacgtgctggacaagcggagaggacgggacccagaaatgggcgggaagccgcgcagaaagaatccccaagagggcctgtacaacgagctccaaaaggataagatggcagaagcctatagcgagattggtatgaaaggggaacgcagaagaggcaaaggccacgacggactgtaccagggactcagcaccgccaccaaggacacctatgacgctcttcacatgcaggccctgccgcctcgg

SEQ ID NO: 45 - protein, 486 aa, Artificial Sequence
  Description of Artificial Sequence: Synthetic polypeptide
MALPVTALLLPLALLLHAARPEIVMTQSPATLSLSPGERATLSCRASQDISKYLNWYQQKPGQAPRLLIYHTSRLHSGIPARFSGSGSGTDYTLTISSLQPEDFAVYFCQQGNTLPYTFGQGTKLEIKGGGGSGGGGSGGGGSQVQLQESGPGLVKPSETLSLTCTVSGVSLPDYGVSWIRQPPGKGLEWIGVIWGSETTYYSSSLKSRVTISKDNSKNQVSLKLSSVTAADTAVYYCAKHYYYGGSYAMDYWGQGTLVTVSSTTTPAPRPPTPAPTIASQPLSLRPEACRPAAGGAVHTRGLDFACDIYIWAPLAGTCGVLLLSLVITLYCKRGRKKLLYIFKQPFMRPVQTTQEEDGCSCRFPEEEEGGCELRVKFSRSADAPAYKQGQNQLYNELNLGRREEYDVLDKRRGRDPEMGGKPRRKNPQEGLYNELQKDKMAEAYSEIGMKGERRRGKGHDGLYQGLSTATKDTYDALHMQALPPR

SEQ ID NO: 46 - protein, 242 aa, Artificial Sequence
  Description of Artificial Sequence: Synthetic polypeptide
EIVMTQSPATLSLSPGERATLSCRASQDISKYLNWYQQKPGQAPRLLIYHTSRLHSGIPARFSGSGSGTDYTLTISSLQPEDFAVYFCQQGNTLPYTFGQGTKLEIKGGGGSGGGGSGGGGSQVQLQESGPGLVKPSETLSLTCTVSGVSLPDYGVSWIRQPPGKGLEWIGVIWGSETTYYQSSLKSRVTISKDNSKNQVSLKLSSVTAADTAVYYCAKHYYYGGSYAMDYWGQGTLVTVSS

SEQ ID NO: 47 - DNA, 813 bp, Artificial Sequence
  Description of Artificial Sequence: Synthetic polynucleotide
atggccctccctgtcaccgccctgctgcttccgctggctcttctgctccacgccgctcggcccgaaattgtgatgacccagtcacccgccactcttagcctttcacccggtgagcgcgcaaccctgtcttgcagagcctcccaagacatctcaaaataccttaattggtatcaacagaagcccggacaggctcctcgccttctgatctaccacaccagccggctccattctggaatccctgccaggttcagcggtagcggatctgggaccgactacaccctcactatcagctcactgcagccagaggacttcgctgtctatttctgtcagcaagggaacaccctgccctacacctttggacagggcaccaagctcgagattaaaggtggaggtggcagcggaggaggtgggtccggcggtggaggaagccaggtccaactccaagaaagcggaccgggtcttgtgaagccatcagaaactctttcactgacttgtactgtgagcggagtgtctctccccgattacggggtgtcttggatcagacagccaccggggaagggtctggaatggattggagtgatttggggctctgagactacttactaccaatcatccctcaagtcacgcgtcaccatctcaaaggacaactctaagaatcaggtgtcactgaaactgtcatctgtgaccgcagccgacaccgccgtgtactattgcgctaagcattactattatggcgggagctacgcaatggattactggggacagggtactctggtcaccgtgtccagccaccaccatcatcaccatcaccat

SEQ ID NO: 48 - protein, 271 aa, Artificial Sequence
  Description of Artificial Sequence: Synthetic polypeptide
MALPVTALLLPLALLLHAARPEIVMTQSPATLSLSPGERATLSCRASQDISKYLNWYQQKPGQAPRLLIYHTSRLHSGIPARFSGSGSGTDYTLTISSLQPEDFAVYFCQQGNTLPYTFGQGTKLEIKGGGGSGGGGSGGGGSQVQLQESGPGLVKPSETLSLTCTVSGVSLPDYGVSWIRQPPGKGLEWIGVIWGSETTYYQSSLKSRVTISKDNSKNQVSLKLSSVTAADTAVYYCAKHYYYGGSYAMDYWGQGTLVTVSSHHHHHHHH

SEQ ID NO: 49 - DNA, 1458 bp, Artificial Sequence
  Description of Artificial Sequence: Synthetic polynucleotide
atggccctccctgtcaccgccctgctgcttccgctggctcttctgctccacgccgctcggcccgaaattgtgatgacccagtcacccgccactcttagcctttcacccggtgagcgcgcaaccctgtcttgcagagcctcccaagacatctcaaaataccttaattggtatcaacagaagcccggacaggctcctcgccttctgatctaccacaccagccggctccattctggaatccctgccaggttcagcggtagcggatctgggaccgactacaccctcactatcagctcactgcagccagaggacttcgctgtctatttctgtcagcaagggaacaccctgccctacacctttggacagggcaccaagctcgagattaaaggtggaggtggcagcggaggaggtgggtccggcggtggaggaagccaggtccaactccaagaaagcggaccgggtcttgtgaagccatcagaaactctttcactgacttgtactgtgagcggagtgtctctccccgattacggggtgtcttggatcagacagccaccggggaagggtctggaatggattggagtgatttggggctctgagactacttactaccaatcatccctcaagtcacgcgtcaccatctcaaaggacaactctaagaatcaggtgtcactgaaactgtcatctgtgaccgcagccgacaccgccgtgtactattgcgctaagcattactattatggcgggagctacgcaatggattactggggacagggtactctggtcaccgtgtccagcaccactaccccagcaccgaggccacccaccccggctcctaccatcgcctcccagcctctgtccctgcgtccggaggcatgtagacccgcagctggtggggccgtgcatacccggggtcttgacttcgcctgcgatatctacatttgggcccctctggctggtacttgcggggtcctgctgctttcactcgtgatcactctttactgtaagcgcggtcggaagaagctgctgtacatctttaagcaacccttcatgaggcctgtgcagactactcaagaggaggacggctgttcatgccggttcccagaggaggaggaaggcggctgcgaactgcgcgtgaaattcagccgcagcgcagatgctccagcctacaagcaggggcagaaccagctctacaacgaactcaatcttggtcggagagaggagtacgacgtgctggacaagcggagaggacgggacccagaaatgggcgggaagccgcgcagaaagaatccccaagagggcctgtacaacgagctccaaaaggataagatggcagaagcctatagcgagattggtatgaaaggggaacgcagaagaggcaaaggccacgacggactgtaccagggactcagcaccgccaccaaggacacctatgacgctcttcacatgcaggccctgccgcctcgg

SEQ ID NO: 50 - protein, 486 aa, Artificial Sequence
  Description of Artificial Sequence: Synthetic polypeptide
MALPVTALLLPLALLLHAARPEIVMTQSPATLSLSPGERATLSCRASQDISKYLNWYQQKPGQAPRLLIYHTSRLHSGIPARFSGSGSGTDYTLTISSLQPEDFAVYFCQQGNTLPYTFGQGTKLEIKGGGGSGGGGSGGGGSQVQLQESGPGLVKPSETLSLTCTVSGVSLPDYGVSWIRQPPGKGLEWIGVIWGSETTYYQSSLKSRVTISKDNSKNQVSLKLSSVTAADTAVYYCAKHYYYGGSYAMDYWGQGTLVTVSSTTTPAPRPPTPAPTIASQPLSLRPEACRPAAGGAVHTRGLDFACDIYIWAPLAGTCGVLLLSLVITLYCKRGRKKLLYIFKQPFMRPVQTTQEEDGCSCRFPEEEEGGCELRVKFSRSADAPAYKQGQNQLYNELNLGRREEYDVLDKRRGRDPEMGGKPRRKNPQEGLYNELQKDKMAEAYSEIGMKGERRRGKGHDGLYQGLSTATKDTYDALHMQALPPR

SEQ ID NO: 51 - protein, 242 aa, Artificial Sequence
  Description of Artificial Sequence: Synthetic polypeptide
QVQLQESGPGLVKPSETLSLTCTVSGVSLPDYGVSWIRQPPGKGLEWIGVIWGSETTYYSSSLKSRVTISKDNSKNQVSLKLSSVTAADTAVYYCAKHYYYGGSYAMDYWGQGTLVTVSSGGGGSGGGGSGGGGSEIVMTQSPATLSLSPGERATLSCRASQDISKYLNWYQQKPGQAPRLLIYHTSRLHSGIPARFSGSGSGTDYTLTISSLQPEDFAVYFCQQGNTLPYTFGQGTKLEIK

SEQ ID NO: 52 - DNA, 813 bp, Artificial Sequence
  Description of Artificial Sequence: Synthetic polynucleotide
atggctctgcccgtgaccgcactcctcctgccactggctctgctgcttcacgccgctcgcccacaagtccagcttcaagaatcagggcctggtctggtgaagccatctgagactctgtccctcacttgcaccgtgagcggagtgtccctcccagactacggagtgagctggattagacagcctcccggaaagggactggagtggatcggagtgatttggggtagcgaaaccacttactattcatcttccctgaagtcacgggtcaccatttcaaaggataactcaaagaatcaagtgagcctcaagctctcatcagtcaccgccgctgacaccgccgtgtattactgtgccaagcattactactatggagggtcctacgccatggactactggggccagggaactctggtcactgtgtcatctggtggaggaggtagcggaggaggcgggagcggtggaggtggctccgaaatcgtgatgacccagagccctgcaaccctgtccctttctcccggggaacgggctaccctttcttgtcgggcatcacaagatatctcaaaatacctcaattggtatcaacagaagccgggacaggcccctaggcttcttatctaccacacctctcgcctgcatagcgggattcccgcacgctttagcgggtctggaagcgggaccgactacactctgaccatctcatctctccagcccgaggacttcgccgtctacttctgccagcagggtaacaccctgccgtacaccttcggccagggcaccaagcttgagatcaaacatcaccaccatcatcaccatcac

SEQ ID NO: 53 - protein, 271 aa, Artificial Sequence
  Description of Artificial Sequence: Synthetic polypeptide
MALPVTALLLPLALLLHAARPQVQLQESGPGLVKPSETLSLTCTVSGVSLPDYGVSWIRQPPGKGLEWIGVIWGSETTYYSSSLKSRVTISKDNSKNQVSLKLSSVTAADTAVYYCAKHYYYGGSYAMDYWGQGTLVTVSSGGGGSGGGGSGGGGSEIVMTQSPATLSLSPGERATLSCRASQDISKYLNWYQQKPGQAPRLLIYHTSRLHSGIPARFSGSGSGTDYTLTISSLQPEDFAVYFCQQGNTLPYTFGQGTKLEIKHHHHHHHH

SEQ ID NO: 54 - DNA, 1458 bp, Artificial Sequence
  Description of Artificial Sequence: Synthetic polynucleotide
atggctctgcccgtgaccgcactcctcctgccactggctctgctgcttcacgccgctcgcccacaagtccagcttcaagaatcagggcctggtctggtgaagccatctgagactctgtccctcacttgcaccgtgagcggagtgtccctcccagactacggagtgagctggattagacagcctcccggaaagggactggagtggatcggagtgatttggggtagcgaaaccacttactattcatcttccctgaagtcacgggtcaccatttcaaaggataactcaaagaatcaagtgagcctcaagctctcatcagtcaccgccgctgacaccgccgtgtattactgtgccaagcattactactatggagggtcctacgccatggactactggggccagggaactctggtcactgtgtcatctggtggaggaggtagcggaggaggcgggagcggtggaggtggctccgaaatcgtgatgacccagagccctgcaaccctgtccctttctcccggggaacgggctaccctttcttgtcgggcatcacaagatatctcaaaatacctcaattggtatcaacagaagccgggacaggcccctaggcttcttatctaccacacctctcgcctgcatagcgggattcccgcacgctttagcgggtctggaagcgggaccgactacactctgaccatctcatctctccagcccgaggacttcgccgtctacttctgccagcagggtaacaccctgccgtacaccttcggccagggcaccaagcttgagatcaaaaccactactcccgctccaaggccacccacccctgccccgaccatcgcctctcagccgctttccctgcgtccggaggcatgtagacccgcagctggtggggccgtgcatacccggggtcttgacttcgcctgcgatatctacatttgggcccctctggctggtacttgcggggtcctgctgctttcactcgtgatcactctttactgtaagcgcggtcggaagaagctgctgtacatctttaagcaacccttcatgaggcctgtgcagactactcaagaggaggacggctgttcatgccggttcccagaggaggaggaaggcggctgcgaactgcgcgtgaaattcagccgcagcgcagatgctccagcctacaagcaggggcagaaccagctctacaacgaactcaatcttggtcggagagaggagtacgacgtgctggacaagcggagaggacgggacccagaaatgggcgggaagccgcgcagaaagaatccccaagagggcctgtacaacgagctccaaaaggataagatggcagaagcctatagcgagattggtatgaaaggggaacgcagaagaggcaaaggccacgacggactgtaccagggactcagcaccgccaccaaggacacctatgacgctcttcacatgcaggccctgccgcctcgg

SEQ ID NO: 55 - protein, 486 aa, Artificial Sequence
  Description of Artificial Sequence: Synthetic polypeptide
MALPVTALLLPLALLLHAARPQVQLQESGPGLVKPSETLSLTCTVSGVSLPDYGVSWIRQPPGKGLEWIGVIWGSETTYYSSSLKSRVTISKDNSKNQVSLKLSSVTAADTAVYYCAKHYYYGGSYAMDYWGQGTLVTVSSGGGGSGGGGSGGGGSEIVMTQSPATLSLSPGERATLSCRASQDISKYLNWYQQKPGQAPRLLIYHTSRLHSGIPARFSGSGSGTDYTLTISSLQPEDFAVYFCQQGNTLPYTFGQGTKLEIKTTTPAPRPPTPAPTIASQPLSLRPEACRPAAGGAVHTRGLDFACDIYIWAPLAGTCGVLLLSLVITLYCKRGRKKLLYIFKQPFMRPVQTTQEEDGCSCRFPEEEEGGCELRVKFSRSADAPAYKQGQNQLYNELNLGRREEYDVLDKRRGRDPEMGGKPRRKNPQEGLYNELQKDKMAEAYSEIGMKGERRRGKGHDGLYQGLSTATKDTYDALHMQALPPR

SEQ ID NO: 56 - protein, 242 aa, Artificial Sequence
  Description of Artificial Sequence: Synthetic polypeptide
QVQLQESGPGLVKPSETLSLTCTVSGVSLPDYGVSWIRQPPGKGLEWIGVIWGSETTYYQSSLKSRVTISKDNSKNQVSLKLSSVTAADTAVYYCAKHYYYGGSYAMDYWGQGTLVTVSSGGGGSGGGGSGGGGSEIVMTQSPATLSLSPGERATLSCRASQDISKYLNWYQQKPGQAPRLLIYHTSRLHSGIPARFSGSGSGTDYTLTISSLQPEDFAVYFCQQGNTLPYTFGQGTKLEIK

SEQ ID NO: 57 - DNA, 813 bp, Artificial Sequence
  Description of Artificial Sequence: Synthetic polynucleotide
atggctctgcccgtgaccgcactcctcctgccactggctctgctgcttcacgccgctcgcccacaagtccagcttcaagaatcagggcctggtctggtgaagccatctgagactctgtccctcacttgcaccgtgagcggagtgtccctcccagactacggagtgagctggattagacagcctcccggaaagggactggagtggatcggagtgatttggggtagcgaaaccacttactatcaatcttccctgaagtcacgggtcaccatttcaaaggataactcaaagaatcaagtgagcctcaagctctcatcagtcaccgccgctgacaccgccgtgtattactgtgccaagcattactactatggagggtcctacgccatggactactggggccagggaactctggtcactgtgtcatctggtggaggaggtagcggaggaggcgggagcggtggaggtggctccgaaatcgtgatgacccagagccctgcaaccctgtccctttctcccggggaacgggctaccctttcttgtcgggcatcacaagatatctcaaaatacctcaattggtatcaacagaagccgggacaggcccctaggcttcttatctaccacacctctcgcctgcatagcgggattcccgcacgctttagcgggtctggaagcgggaccgactacactctgaccatctcatctctccagcccgaggacttcgccgtctacttctgccagcagggtaacaccctgccgtacaccttcggccagggcaccaagcttgagatcaaacatcaccaccatcatcaccatcac

SEQ ID NO: 58 - protein, 271 aa, Artificial Sequence
  Description of Artificial Sequence: Synthetic polypeptide
MALPVTALLLPLALLLHAARPQVQLQESGPGLVKPSETLSLTCTVSGVSLPDYGVSWIRQPPGKGLEWIGVIWGSETTYYQSSLKSRVTISKDNSKNQVSLKLSSVTAADTAVYYCAKHYYYGGSYAMDYWGQGTLVTVSSGGGGSGGGGSGGGGSEIVMTQSPATLSLSPGERATLSCRASQDISKYLNWYQQKPGQAPRLLIYHTSRLHSGIPARFSGSGSGTDYTLTISSLQPEDFAVYFCQQGNTLPYTFGQGTKLEIKHHHHHHHH

SEQ ID NO: 59 - DNA, 1458 bp, Artificial Sequence
  Description of Artificial Sequence: Synthetic polynucleotide
atggctctgcccgtgaccgcactcctcctgccactggctctgctgcttcacgccgctcgcccacaagtccagcttcaagaatcagggcctggtctggtgaagccatctgagactctgtccctcacttgcaccgtgagcggagtgtccctcccagactacggagtgagctggattagacagcctcccggaaagggactggagtggatcggagtgatttggggtagcgaaaccacttactatcaatcttccctgaagtcacgggtcaccatttcaaaggataactcaaagaatcaagtgagcctcaagctctcatcagtcaccgccgctgacaccgccgtgtattactgtgccaagcattactactatggagggtcctacgccatggactactggggccagggaactctggtcactgtgtcatctggtggaggaggtagcggaggaggcgggagcggtggaggtggctccgaaatcgtgatgacccagagccctgcaaccctgtccctttctcccggggaacgggctaccctttcttgtcgggcatcacaagatatctcaaaatacctcaattggtatcaacagaagccgggacaggcccctaggcttcttatctaccacacctctcgcctgcatagcgggattcccgcacgctttagcgggtctggaagcgggaccgactacactctgaccatctcatctctccagcccgaggacttcgccgtctacttctgccagcagggtaacaccctgccgtacaccttcggccagggcaccaagcttgagatcaaaaccactactcccgctccaaggccacccacccctgccccgaccatcgcctctcagccgctttccctgcgtccggaggcatgtagacccgcagctggtggggccgtgcatacccggggtcttgacttcgcctgcgatatctacatttgggcccctctggctggtacttgcggggtcctgctgctttcactcgtgatcactctttactgtaagcgcggtcggaagaagctgctgtacatctttaagcaacccttcatgaggcctgtgcagactactcaagaggaggacggctgttcatgccggttcccagaggaggaggaaggcggctgcgaactgcgcgtgaaattcagccgcagcgcagatgctccagcctacaagcaggggcagaaccagctctacaacgaactcaatcttggtcggagagaggagtacgacgtgctggacaagcggagaggacgggacccagaaatgggcgggaagccgcgcagaaagaatccccaagagggcctgtacaacgagctccaaaaggataagatggcagaagcctatagcgagattggtatgaaaggggaacgcagaagaggcaaaggccacgacggactgtaccagggactcagcaccgccaccaaggacacctatgacgctcttcacatgcaggccctgccgcctcgg

SEQ ID NO: 60 - protein, 486 aa, Artificial Sequence
  Description of Artificial Sequence: Synthetic polypeptide
MALPVTALLLPLALLLHAARPQVQLQESGPGLVKPSETLSLTCTVSGVSLPDYGVSWIRQPPGKGLEWIGVIWGSETTYYQSSLKSRVTISKDNSKNQVSLKLSSVTAADTAVYYCAKHYYYGGSYAMDYWGQGTLVTVSSGGGGSGGGGSGGGGSEIVMTQSPATLSLSPGERATLSCRASQDISKYLNWYQQKPGQAPRLLIYHTSRLHSGIPARFSGSGSGTDYTLTISSLQPEDFAVYFCQQGNTLPYTFGQGTKLEIKTTTPAPRPPTPAPTIASQPLSLRPEACRPAAGGAVHTRGLDFACDIYIWAPLAGTCGVLLLSLVITLYCKRGRKKLLYIFKQPFMRPVQTTQEEDGCSCRFPEEEEGGCELRVKFSRSADAPAYKQGQNQLYNELNLGRREEYDVLDKRRGRDPEMGGKPRRKNPQEGLYNELQKDKMAEAYSEIGMKGERRRGKGHDGLYQGLSTATKDTYDALHMQALPPR

SEQ ID NO: 61 - protein, 247 aa, Artificial Sequence
  Description of Artificial Sequence: Synthetic polypeptide
EIVMTQSPATLSLSPGERATLSCRASQDISKYLNWYQQKPGQAPRLLIYHTSRLHSGIPARFSGSGSGTDYTLTISSLQPEDFAVYFCQQGNTLPYTFGQGTKLEIKGGGGSGGGGSGGGGSGGGGSQVQLQESGPGLVKPSETLSLTCTVSGVSLPDYGVSWIRQPPGKGLEWIGVIWGSETTYYSSSLKSRVTISKDNSKNQVSLKLSSVTAADTAVYYCAKHYYYGGSYAMDYWGQGTLVTVSS

SEQ ID NO: 62 - DNA, 828 bp, Artificial Sequence
  Description of Artificial Sequence: Synthetic polynucleotide
atggccctcccagtgaccgctctgctgctgcctctcgcacttcttctccatgccgctcggcctgagatcgtcatgacccaaagccccgctaccctgtccctgtcacccggcgagagggcaaccctttcatgcagggccagccaggacatttctaagtacctcaactggtatcagcagaagccagggcaggctcctcgcctgctgatctaccacaccagccgcctccacagcggtatccccgccagattttccgggagcgggtctggaaccgactacaccctcaccatctcttctctgcagcccgaggatttcgccgtctatttctgccagcaggggaatactctgccgtacaccttcggtcaaggtaccaagctggaaatcaagggaggcggaggatcaggcggtggcggaagcggaggaggtggctccggaggaggaggttcccaagtgcagcttcaagaatcaggacccggacttgtgaagccatcagaaaccctctccctgacttgtaccgtgtccggtgtgagcctccccgactacggagtctcttggattcgccagcctccggggaagggtcttgaatggattggggtgatttggggatcagagactacttactactcttcatcacttaagtcacgggtcaccatcagcaaagataatagcaagaaccaagtgtcacttaagctgtcatctgtgaccgccgctgacaccgccgtgtactattgtgccaaacattactattacggagggtcttatgctatggactactggggacaggggaccctggtgactgtctctagccatcaccatcaccaccatcatcac

SEQ ID NO: 63 - protein, 276 aa, Artificial Sequence
  Description of Artificial Sequence: Synthetic polypeptide
MALPVTALLLPLALLLHAARPEIVMTQSPATLSLSPGERATLSCRASQDISKYLNWYQQKPGQAPRLLIYHTSRLHSGIPARFSGSGSGTDYTLTISSLQPEDFAVYFCQQGNTLPYTFGQGTKLEIKGGGGSGGGGSGGGGSGGGGSQVQLQESGPGLVKPSETLSLTCTVSGVSLPDYGVSWIRQPPGKGLEWIGVIWGSETTYYSSSLKSRVTISKDNSKNQVSLKLSSVTAADTAVYYCAKHYYYGGSYAMDYWGQGTLVTVSSHHHHHHHH

SEQ ID NO: 64 - DNA, 1473 bp, Artificial Sequence
  Description of Artificial Sequence: Synthetic polynucleotide
atggccctccctgtcaccgccctgctgcttccgctggctcttctgctccacgccgctcggcccgaaattgtgatgacccagtcacccgccactcttagcctttcacccggtgagcgcgcaaccctgtcttgcagagcctcccaagacatctcaaaataccttaattggtatcaacagaagcccggacaggctcctcgccttctgatctaccacaccagccggctccattctggaatccctgccaggttcagcggtagcggatctgggaccgactacaccctcactatcagctcactgcagccagaggacttcgctgtctatttctgtcagcaagggaacaccctgccctacacctttggacagggcaccaagctcgagattaaaggtggaggtggcagcggaggaggtgggtccggcggtggaggaagcggcggaggcgggagccaggtccaactccaagaaagcggaccgggtcttgtgaagccatcagaaactctttcactgacttgtactgtgagcggagtgtctctccccgattacggggtgtcttggatcagacagccaccggggaagggtctggaatggattggagtgatttggggctctgagactacttactactcttcatccctcaagtcacgcgtcaccatctcaaaggacaactctaagaatcaggtgtcactgaaactgtcatctgtgaccgcagccgacaccgccgtgtactattgcgctaagcattactattatggcgggagctacgcaatggattactggggacagggtactctggtcaccgtgtccagcaccactaccccagcaccgaggccacccaccccggctcctaccatcgcctcccagcctctgtccctgcgtccggaggcatgtagacccgcagctggtggggccgtgcatacccggggtcttgacttcgcctgcgatatctacatttgggcccctctggctggtacttgcggggtcctgctgctttcactcgtgatcactctttactgtaagcgcggtcggaagaagctgctgtacatctttaagcaacccttcatgaggcctgtgcagactactcaagaggaggacggctgttcatgccggttcccagaggaggaggaaggcggctgcgaactgcgcgtgaaattcagccgcagcgcagatgctccagcctacaagcaggggcagaaccagctctacaacgaactcaatcttggtcggagagaggagtacgacgtgctggacaagcggagaggacgggacccagaaatgggcgggaagccgcgcagaaagaatccccaagagggcctgtacaacgagctccaaaaggataagatggcagaagcctatagcgagattggtatgaaaggggaacgcagaagaggcaaaggccacgacggactgtaccagggactcagcaccgccaccaaggacacctatgacgctcttcacatgcaggccctgccgcctcgg

SEQ ID NO: 65 - protein, 491 aa, Artificial Sequence
  Description of Artificial Sequence: Synthetic polypeptide
MALPVTALLLPLALLLHAARPEIVMTQSPATLSLSPGERATLSCRASQDISKYLNWYQQKPGQAPRLLIYHTSRLHSGIPARFSGSGSGTDYTLTISSLQPEDFAVYFCQQGNTLPYTFGQGTKLEIKGGGGSGGGGSGGGGSGGGGSQVQLQESGPGLVKPSETLSLTCTVSGVSLPDYGVSWIRQPPGKGLEWIGVIWGSETTYYSSSLKSRVTISKDNSKNQVSLKLSSVTAADTAVYYCAKHYYYGGSYAMDYWGQGTLVTVSSTTTPAPRPPTPAPTIASQPLSLRPEACRPAAGGAVHTRGLDFACDIYIWAPLAGTCGVLLLSLVITLYCKRGRKKLLYIFKQPFMRPVQTTQEEDGCSCRFPEEEEGGCELRVKFSRSADAPAYKQGQNQLYNELNLGRREEYDVLDKRRGRDPEMGGKPRRKNPQEGLYNELQKDKMAEAYSEIGMKGERRRGKGHDGLYQGLSTATKDTYDALHMQALPPR

SEQ ID NO: 66 - protein, 247 aa, Artificial Sequence
  Description of Artificial Sequence: Synthetic polypeptide
EIVMTQSPATLSLSPGERATLSCRASQDISKYLNWYQQKPGQAPRLLIYHTSRLHSGIPARFSGSGSGTDYTLTISSLQPEDFAVYFCQQGNTLPYTFGQGTKLEIKGGGGSGGGGSGGGGSGGGGSQVQLQESGPGLVKPSETLSLTCTVSGVSLPDYGVSWIRQPPGKGLEWIGVIWGSETTYYQSSLKSRVTISKDNSKNQVSLKLSSVTAADTAVYYCAKHYYYGGSYAMDYWGQGTLVTVSS

SEQ ID NO: 67 - DNA, 828 bp, Artificial Sequence
  Description of Artificial Sequence: Synthetic polynucleotide
atggccctcccagtgaccgctctgctgctgcctctcgcacttcttctccatgccgctcggcctgagatcgtcatgacccaaagccccgctaccctgtccctgtcacccggcgagagggcaaccctttcatgcagggccagccaggacatttctaagtacctcaactggtatcagcagaagccagggcaggctcctcgcctgctgatctaccacaccagccgcctccacagcggtatccccgccagattttccgggagcgggtctggaaccgactacaccctcaccatctcttctctgcagcccgaggatttcgccgtctatttctgccagcaggggaatactctgccgtacaccttcggtcaaggtaccaagctggaaatcaagggaggcggaggatcaggcggtggcggaagcggaggaggtggctccggaggaggaggttcccaagtgcagcttcaagaatcaggacccggacttgtgaagccatcagaaaccctctccctgacttgtaccgtgtccggtgtgagcctccccgactacggagtctcttggattcgccagcctccggggaagggtcttgaatggattggggtgatttggggatcagagactacttactaccagtcatcacttaagtcacgggtcaccatcagcaaagataatagcaagaaccaagtgtcacttaagctgtcatctgtgaccgccgctgacaccgccgtgtactattgtgccaaacattactattacggagggtcttatgctatggactactggggacaggggaccctggtgactgtctctagccatcaccatcaccaccatcatcac

SEQ ID NO: 68 - protein, 276 aa, Artificial Sequence
  Description of Artificial Sequence: Synthetic polypeptide
MALPVTALLLPLALLLHAARPEIVMTQSPATLSLSPGERATLSCRASQDISKYLNWYQQKPGQAPRLLIYHTSRLHSGIPARFSGSGSGTDYTLTISSLQPEDFAVYFCQQGNTLPYTFGQGTKLEIKGGGGSGGGGSGGGGSGGGGSQVQLQESGPGLVKPSETLSLTCTVSGVSLPDYGVSWIRQPPGKGLEWIGVIWGSETTYYQSSLKSRVTISKDNSKNQVSLKLSSVTAADTAVYYCAKHYYYGGSYAMDYWGQGTLVTVSSHHHHHHHH

SEQ ID NO: 69 - DNA, 1473 bp, Artificial Sequence
  Description of Artificial Sequence: Synthetic polynucleotide
atggccctccctgtcaccgccctgctgcttccgctggctcttctgctccacgccgctcggcccgaaattgtgatgacccagtcacccgccactcttagcctttcacccggtgagcgcgcaaccctgtcttgcagagcctcccaagacatctcaaaataccttaattggtatcaacagaagcccggacaggctcctcgccttctgatctaccacaccagccggctccattctggaatccctgccaggttcagcggtagcggatctgggaccgactacaccctcactatcagctcactgcagccagaggacttcgctgtctatttctgtcagcaagggaacaccctgccctacacctttggacagggcaccaagctcgagattaaaggtggaggtggcagcggaggaggtgggtccggcggtggaggaagcggaggcggagggagccaggtccaactccaagaaagcggaccgggtcttgtgaagccatcagaaactctttcactgacttgtactgtgagcggagtgtctctccccgattacggggtgtcttggatcagacagccaccggggaagggtctggaatggattggagtgatttggggctctgagactacttactaccaatcatccctcaagtcacgcgtcaccatctcaaaggacaactctaagaatcaggtgtcactgaaactgtcatctgtgaccgcagccgacaccgccgtgtactattgcgctaagcattactattatggcgggagctacgcaatggattactggggacagggtactctggtcaccgtgtccagcaccactaccccagcaccgaggccacccaccccggctcctaccatcgcctcccagcctctgtccctgcgtccggaggcatgtagacccgcagctggtggggccgtgcatacccggggtcttgacttcgcctgcgatatctacatttgggcccctctggctggtacttgcggggtcctgctgctttcactcgtgatcactctttactgtaagcgcggtcggaagaagctgctgtacatctttaagcaacccttcatgaggcctgtgcagactactcaagaggaggacggctgttcatgccggttcccagaggaggaggaaggcggctgcgaactgcgcgtgaaattcagccgcagcgcagatgctccagcctacaagcaggggcagaaccagctctacaacgaactcaatcttggtcggagagaggagtacgacgtgctggacaagcggagaggacgggacccagaaatgggcgggaagccgcgcagaaagaatccccaagagggcctgtacaacgagctccaaaaggataagatggcagaagcctatagcgagattggtatgaaaggggaacgcagaagaggcaaaggccacgacggactgtaccagggactcagcaccgccaccaaggacacctatgacgctcttcacatgcaggccctgccgcctcgg

SEQ ID NO: 70 - protein, 491 aa, Artificial Sequence
  Description of Artificial Sequence: Synthetic polypeptide
MALPVTALLLPLALLLHAARPEIVMTQSPATLSLSPGERATLSCRASQDISKYLNWYQQKPGQAPRLLIYHTSRLHSGIPARFSGSGSGTDYTLTISSLQPEDFAVYFCQQGNTLPYTFGQGTKLEIKGGGGSGGGGSGGGGSGGGGSQVQLQESGPGLVKPSETLSLTCTVSGVSLPDYGVSWIRQPPGKGLEWIGVIWGSETTYYQSSLKSRVTISKDNSKNQVSLKLSSVTAADTAVYYCAKHYYYGGSYAMDYWGQGTLVTVSSTTTPAPRPPTPAPTIASQPLSLRPEACRPAAGGAVHTRGLDFACDIYIWAPLAGTCGVLLLSLVITLYCKRGRKKLLYIFKQPFMRPVQTTQEEDGCSCRFPEEEEGGCELRVKFSRSADAPAYKQGQNQLYNELNLGRREEYDVLDKRRGRDPEMGGKPRRKNPQEGLYNELQKDKMAEAYSEIGMKGERRRGKGHDGLYQGLSTATKDTYDALHMQALPPR

SEQ ID NO: 71 - protein, 247 aa, Artificial Sequence
  Description of Artificial Sequence: Synthetic polypeptide
QVQLQESGPGLVKPSETLSLTCTVSGVSLPDYGVSWIRQPPGKGLEWIGVIWGSETTYYSSSLKSRVTISKDNSKNQVSLKLSSVTAADTAVYYCAKHYYYGGSYAMDYWGQGTLVTVSSGGGGSGGGGSGGGGSGGGGSEIVMTQSPATLSLSPGERATLSCRASQDISKYLNWYQQKPGQAPRLLIYHTSRLHSGIPARFSGSGSGTDYTLTISSLQPEDFAVYFCQQGNTLPYTFGQGTKLEIK

SEQ ID NO: 72 - DNA, 828 bp, Artificial Sequence
  Description of Artificial Sequence: Synthetic polynucleotide
atggcactgcctgtcactgccctcctgctgcctctggccctccttctgcatgccgccaggccccaagtccagctgcaagagtcaggacccggactggtgaagccgtctgagactctctcactgacttgtaccgtcagcggcgtgtccctccccgactacggagtgtcatggatccgccaacctcccgggaaagggcttgaatggattggtgtcatctggggttctgaaaccacctactactcatcttccctgaagtccagggtgaccatcagcaaggataattccaagaaccaggtcagccttaagctgtcatctgtgaccgctgctgacaccgccgtgtattactgcgccaagcactactattacggaggaagctacgctatggactattggggacagggcactctcgtgactgtgagcagcggcggtggagggtctggaggtggaggatccggtggtggtgggtcaggcggaggagggagcgagattgtgatgactcagtcaccagccaccctttctctttcacccggcgagagagcaaccctgagctgtagagccagccaggacatttctaagtacctcaactggtatcagcaaaaaccggggcaggcccctcgcctcctgatctaccatacctcacgccttcactctggtatccccgctcggtttagcggatcaggatctggtaccgactacactctgaccatttccagcctgcagccagaagatttcgcagtgtatttctgccagcagggcaatacccttccttacaccttcggtcagggaaccaagctcgaaatcaagcaccatcaccatcatcaccaccat

SEQ ID NO: 73 - protein, 276 aa, Artificial Sequence
  Description of Artificial Sequence: Synthetic polypeptide
MALPVTALLLPLALLLHAARPQVQLQESGPGLVKPSETLSLTCTVSGVSLPDYGVSWIRQPPGKGLEWIGVIWGSETTYYSSSLKSRVTISKDNSKNQVSLKLSSVTAADTAVYYCAKHYYYGGSYAMDYWGQGTLVTVSSGGGGSGGGGSGGGGSGGGGSEIVMTQSPATLSLSPGERATLSCRASQDISKYLNWYQQKPGQAPRLLIYHTSRLHSGIPARFSGSGSGTDYTLTISSLQPEDFAVYFCQQGNTLPYTFGQGTKLEIKHHHHHHHH

SEQ ID NO: 74 - DNA, 1473 bp, Artificial Sequence
  Description of Artificial Sequence: Synthetic polynucleotide
atggctctgcccgtgaccgcactcctcctgccactggctctgctgcttcacgccgctcgcccacaagtccagcttcaagaatcagggcctggtctggtgaagccatctgagactctgtccctcacttgcaccgtgagcggagtgtccctcccagactacggagtgagctggattagacagcctcccggaaagggactggagtggatcggagtgatttggggtagcgaaaccacttactattcatcttccctgaagtcacgggtcaccatttcaaaggataactcaaagaatcaagtgagcctcaagctctcatcagtcaccgccgctgacaccgccgtgtattactgtgccaagcattactactatggagggtcctacgccatggactactggggccagggaactctggtcactgtgtcatctggtggaggaggtagcggaggaggcgggagcggtggaggtggctccggaggtggcggaagcgaaatcgtgatgacccagagccctgcaaccctgtccctttctcccggggaacgggctaccctttcttgtcgggcatcacaagatatctcaaaatacctcaattggtatcaacagaagccgggacaggcccctaggcttcttatctaccacacctctcgcctgcatagcgggattcccgcacgctttagcgggtctggaagcgggaccgactacactctgaccatctcatctctccagcccgaggacttcgccgtctacttctgccagcagggtaacaccctgccgtacaccttcggccagggcaccaagcttgagatcaaaaccactactcccgctccaaggccacccacccctgccccgaccatcgcctctcagccgctttccctgcgtccggaggcatgtagacccgcagctggtggggccgtgcatacccggggtcttgacttcgcctgcgatatctacatttgggcccctctggctggtacttgcggggtcctgctgctttcactcgtgatcactctttactgtaagcgcggtcggaagaagctgctgtacatctttaagcaacccttcatgaggcctgtgcagactactcaagaggaggacggctgttcatgccggttcccagaggaggaggaaggcggctgcgaactgcgcgtgaaattcagccgcagcgcagatgctccagcctacaagcaggggcagaaccagctctacaacgaactcaatcttggtcggagagaggagtacgacgtgctggacaagcggagaggacgggacccagaaatgggcgggaagccgcgcagaaagaatccccaagagggcctgtacaacgagctccaaaaggataagatggcagaagcctatagcgagattggtatgaaaggggaacgcagaagaggcaaaggccacgacggactgtaccagggactcagcaccgccaccaaggacacctatgacgctcttcacatgcaggccctgccgcctcgg

SEQ ID NO: 75 - protein, 491 aa, Artificial Sequence
  Description of Artificial Sequence: Synthetic polypeptide
MALPVTALLLPLALLLHAARPQVQLQESGPGLVKPSETLSLTCTVSGVSLPDYGVSWIRQPPGKGLEWIGVIWGSETTYYSSSLKSRVTISKDNSKNQVSLKLSSVTAADTAVYYCAKHYYYGGSYAMDYWGQGTLVTVSSGGGGSGGGGSGGGGSGGGGSEIVMTQSPATLSLSPGERATLSCRASQDISKYLNWYQQKPGQAPRLLIYHTSRLHSGIPARFSGSGSGTDYTLTISSLQPEDFAVYFCQQGNTLPYTFGQGTKLEIKTTTPAPRPPTPAPTIASQPLSLRPEACRPAAGGAVHTRGLDFACDIYIWAPLAGTCGVLLLSLVITLYCKRGRKKLLYIFKQPFMRPVQTTQEEDGCSCRFPEEEEGGCELRVKFSRSADAPAYKQGQNQLYNELNLGRREEYDVLDKRRGRDPEMGGKPRRKNPQEGLYNELQKDKMAEAYSEIGMKGERRRGKGHDGLYQGLSTATKDTYDALHMQALPPR

SEQ ID NO: 76 - protein, 247 aa, Artificial Sequence
  Description of Artificial Sequence: Synthetic polypeptide
QVQLQESGPGLVKPSETLSLTCTVSGVSLPDYGVSWIRQPPGKGLEWIGVIWGSETTYYQSSLKSRVTISKDNSKNQVSLKLSSVTAADTAVYYCAKHYYYGGSYAMDYWGQGTLVTVSSGGGGSGGGGSGGGGSGGGGSEIVMTQSPATLSLSPGERATLSCRASQDISKYLNWYQQKPGQAPRLLIYHTSRLHSGIPARFSGSGSGTDYTLTISSLQPEDFAVYFCQQGNTLPYTFGQGTKLEIK

SEQ ID NO: 77 - DNA, 828 bp, Artificial Sequence
  Description of Artificial Sequence: Synthetic polynucleotide
atggcactgcctgtcactgccctcctgctgcctctggccctccttctgcatgccgccaggccccaagtccagctgcaagagtcaggacccggactggtgaagccgtctgagactctctcactgacttgtaccgtcagcggcgtgtccctccccgactacggagtgtcatggatccgccaacctcccgggaaagggcttgaatggattggtgtcatctggggttctgaaaccacctactaccagtcttccctgaagtccagggtgaccatcagcaaggataattccaagaaccaggtcagccttaagctgtcatctgtgaccgctgctgacaccgccgtgtattactgcgccaagcactactattacggaggaagctacgctatggactattggggacagggcactctcgtgactgtgagcagcggcggtggagggtctggaggtggaggatccggtggtggtgggtcaggcggaggagggagcgagattgtgatgactcagtcaccagccaccctttctctttcacccggcgagagagcaaccctgagctgtagagccagccaggacatttctaagtacctcaactggtatcagcaaaaaccggggcaggcccctcgcctcctgatctaccatacctcacgccttcactctggtatccccgctcggtttagcggatcaggatctggtaccgactacactctgaccatttccagcctgcagccagaagatttcgcagtgtatttctgccagcagggcaatacccttccttacaccttcggtcagggaaccaagctcgaaatcaagcaccatcaccatcatcatcaccac

SEQ ID NO: 78 - protein, 276 aa, Artificial Sequence
  Description of Artificial Sequence: Synthetic polypeptide
MALPVTALLLPLALLLHAARPQVQLQESGPGLVKPSETLSLTCTVSGVSLPDYGVSWIRQPPGKGLEWIGVIWGSETTYYQSSLKSRVTISKDNSKNQVSLKLSSVTAADTAVYYCAKHYYYGGSYAMDYWGQGTLVTVSSGGGGSGGGGSGGGGSGGGGSEIVMTQSPATLSLSPGERATLSCRASQDISKYLNWYQQKPGQAPRLLIYHTSRLHSGIPARFSGSGSGTDYTLTISSLQPEDFAVYFCQQGNTLPYTFGQGTKLEIKHHHHHHHH

SEQ ID NO: 79 - DNA, 1473 bp, Artificial Sequence
  Description of Artificial Sequence: Synthetic polynucleotide
atggctctgcccgtgaccgcactcctcctgccactggctctgctgcttcacgccgctcgcccacaagtccagcttcaagaatcagggcctggtctggtgaagccatctgagactctgtccctcacttgcaccgtgagcggagtgtccctcccagactacggagtgagctggattagacagcctcccggaaagggactggagtggatcggagtgatttggggtagcgaaaccacttactatcaatcttccctgaagtcacgggtcaccatttcaaaggataactcaaagaatcaagtgagcctcaagctctcatcagtcaccgccgctgacaccgccgtgtattactgtgccaagcattactactatggagggtcctacgccatggactactggggccagggaactctggtcactgtgtcatctggtggaggaggtagcggaggaggcgggagcggtggaggtggctccggaggcggtgggtcagaaatcgtgatgacccagagccctgcaaccctgtccctttctcccggggaacgggctaccctttcttgtcgggcatcacaagatatctcaaaatacctcaattggtatcaacagaagccgggacaggcccctaggcttcttatctaccacacctctcgcctgcatagcgggattcccgcacgctttagcgggtctggaagcgggaccgactacactctgaccatctcatctctccagcccgaggacttcgccgtctacttctgccagcagggtaacaccctgccgtacaccttcggccagggcaccaagcttgagatcaaaaccactactcccgctccaaggccacccacccctgccccgaccatcgcctctcagccgctttccctgcgtccggaggcatgtagacccgcagctggtggggccgtgcatacccggggtcttgacttcgcctgcgatatctacatttgggcccctctggctggtacttgcggggtcctgctgctttcactcgtgatcactctttactgtaagcgcggtcggaagaagctgctgtacatctttaagcaacccttcatgaggcctgtgcagactactcaagaggaggacggctgttcatgccggttcccagaggaggaggaaggcggctgcgaactgcgcgtgaaattcagccgcagcgcagatgctccagcctacaagcaggggcagaaccagctctacaacgaactcaatcttggtcggagagaggagtacgacgtgctggacaagcggagaggacgggacccagaaatgggcgggaagccgcgcagaaagaatccccaagagggcctgtacaacgagctccaaaaggataagatggcagaagcctatagcgagattggtatgaaaggggaacgcagaagaggcaaaggccacgacggactgtaccagggactcagcaccgccaccaaggacacctatgacgctcttcacatgcaggccctgccgcctcgg

SEQ ID NO: 80 - protein, 491 aa, Artificial Sequence
  Description of Artificial Sequence: Synthetic polypeptide
MALPVTALLLPLALLLHAARPQVQLQESGPGLVKPSETLSLTCTVSGVSLPDYGVSWIRQPPGKGLEWIGVIWGSETTYYQSSLKSRVTISKDNSKNQVSLKLSSVTAADTAVYYCAKHYYYGGSYAMDYWGQGTLVTVSSGGGGSGGGGSGGGGSGGGGSEIVMTQSPATLSLSPGERATLSCRASQDISKYLNWYQQKPGQAPRLLIYHTSRLHSGIPARFSGSGSGTDYTLTISSLQPEDFAVYFCQQGNTLPYTFGQGTKLEIKTTTPAPRPPTPAPTIASQPLSLRPEACRPAAGGAVHTRGLDFACDIYIWAPLAGTCGVLLLSLVITLYCKRGRKKLLYIFKQPFMRPVQTTQEEDGCSCRFPEEEEGGCELRVKFSRSADAPAYKQGQNQLYNELNLGRREEYDVLDKRRGRDPEMGGKPRRKNPQEGLYNELQKDKMAEAYSEIGMKGERRRGKGHDGLYQGLSTATKDTYDALHMQALPPR

SEQ ID NO: 81 - protein, 247 aa, Artificial Sequence
  Description of Artificial Sequence: Synthetic polypeptide
EIVMTQSPATLSLSPGERATLSCRASQDISKYLNWYQQKPGQAPRLLIYHTSRLHSGIPARFSGSGSGTDYTLTISSLQPEDFAVYFCQQGNTLPYTFGQGTKLEIKGGGGSGGGGSGGGGSGGGGSQVQLQESGPGLVKPSETLSLTCTVSGVSLPDYGVSWIRQPPGKGLEWIGVIWGSETTYYNSSLKSRVTISKDNSKNQVSLKLSSVTAADTAVYYCAKHYYYGGSYAMDYWGQGTLVTVSS

SEQ ID NO: 82 - DNA, 828 bp, Artificial Sequence
  Description of Artificial Sequence: Synthetic polynucleotide
atggccctcccagtgaccgctctgctgctgcctctcgcacttcttctccatgccgctcggcctgagatcgtcatgacccaaagccccgctaccctgtccctgtcacccggcgagagggcaaccctttcatgcagggccagccaggacatttctaagtacctcaactggtatcagcagaagccagggcaggctcctcgcctgctgatctaccacaccagccgcctccacagcggtatccccgccagattttccgggagcgggtctggaaccgactacaccctcaccatctcttctctgcagcccgaggatttcgccgtctatttctgccagcaggggaatactctgccgtacaccttcggtcaaggtaccaagctggaaatcaagggaggcggaggatcaggcggtggcggaagcggaggaggtggctccggaggaggaggttcccaagtgcagcttcaagaatcaggacccggacttgtgaagccatcagaaaccctctccctgacttgtaccgtgtccggtgtgagcctccccgactacggagtctcttggattcgccagcctccggggaagggtcttgaatggattggggtgatttggggatcagagactacttactacaattcatcacttaagtcacgggtcaccatcagcaaagataatagcaagaaccaagtgtcacttaagctgtcatctgtgaccgccgctgacaccgccgtgtactattgtgccaaacattactattacggagggtcttatgctatggactactggggacaggggaccctggtgactgtctctagccatcaccatcaccaccatcatcac

SEQ ID NO: 83 - protein, 276 aa, Artificial Sequence
  Description of Artificial Sequence: Synthetic polypeptide
MALPVTALLLPLALLLHAARPEIVMTQSPATLSLSPGERATLSCRASQDISKYLNWYQQKPGQAPRLLIYHTSRLHSGIPARFSGSGSGTDYTLTISSLQPEDFAVYFCQQGNTLPYTFGQGTKLEIKGGGGSGGGGSGGGGSGGGGSQVQLQESGPGLVKPSETLSLTCTVSGVSLPDYGVSWIRQPPGKGLEWIGVIWGSETTYYNSSLKSRVTISKDNSKNQVSLKLSSVTAADTAVYYCAKHYYYGGSYAMDYWGQGTLVTVSSHHHHHHHH

SEQ ID NO: 84 - DNA, 1473 bp, Artificial Sequence
  Description of Artificial Sequence: Synthetic polynucleotide
atggccctccctgtcaccgccctgctgcttccgctggctcttctgctccacgccgctcggcccgaaattgtgatgacccagtcacccgccactcttagcctttcacccggtgagcgcgcaaccctgtcttgcagagcctcccaagacatctcaaaataccttaattggtatcaacagaagcccggacaggctcctcgccttctgatctaccacaccagccggctccattctggaatccctgccaggttcagcggtagcggatctgggaccgactacaccctcactatcagctcactgcagccagaggacttcgctgtctatttctgtcagcaagggaacaccctgccctacacctttggacagggcaccaagctcgagattaaaggtggaggtggcagcggaggaggtgggtccggcggtggaggaagcggaggcggtgggagccaggtccaactccaagaaagcggaccgggtcttgtgaagccatcagaaactctttcactgacttgtactgtgagcggagtgtctctccccgattacggggtgtcttggatcagacagccaccggggaagggtctggaatggattggagtgatttggggctctgagactacttactacaactcatccctcaagtcacgcgtcaccatctcaaaggacaactctaagaatcaggtgtcactgaaactgtcatctgtgaccgcagccgacaccgccgtgtactattgcgctaagcattactattatggcgggagctacgcaatggattactggggacagggtactctggtcaccgtgtccagcaccactaccccagcaccgaggccacccaccccggctcctaccatcgcctcccagcctctgtccctgcgtccggaggcatgtagacccgcagctggtggggccgtgcatacccggggtcttgacttcgcctgcgatatctacatttgggcccctctggctggtacttgcggggtcctgctgctttcactcgtgatcactctttactgtaagcgcggtcggaagaagctgctgtacatctttaagcaacccttcatgaggcctgtgcagactactcaagaggaggacggctgttcatgccggttcccagaggaggaggaaggcggctgcgaactgcgcgtgaaattcagccgcagcgcagatgctccagcctacaagcaggggcagaaccagctctacaacgaactcaatcttggtcggagagaggagtacgacgtgctggacaagcggagaggacgggacccagaaatgggcgggaagccgcgcagaaagaatccccaagagggcctgtacaacgagctccaaaaggataagatggcagaagcctatagcgagattggtatgaaaggggaacgcagaagaggcaaaggccacgacggactgtaccagggactcagcaccgccaccaaggacacctatgacgctcttcacatgcaggccctgccgcctcgg

SEQ ID NO: 85 - protein, 491 aa, Artificial Sequence
  Description of Artificial Sequence: Synthetic polypeptide
MALPVTALLLPLALLLHAARPEIVMTQSPATLSLSPGERATLSCRASQDISKYLNWYQQKPGQAPRLLIYHTSRLHSGIPARFSGSGSGTDYTLTISSLQPEDFAVYFCQQGNTLPYTFGQGTKLEIKGGGGSGGGGSGGGGSGGGGSQVQLQESGPGLVKPSETLSLTCTVSGVSLPDYGVSWIRQPPGKGLEWIGVIWGSETTYYNSSLKSRVTISKDNSKNQVSLKLSSVTAADTAVYYCAKHYYYGGSYAMDYWGQGTLVTVSSTTTPAPRPPTPAPTIASQPLSLRPEACRPAAGGAVHTRGLDFACDIYIWAPLAGTCGVLLLSLVITLYCKRGRKKLLYIFKQPFMRPVQTTQEEDGCSCRFPEEEEGGCELRVKFSRSADAPAYKQGQNQLYNELNLGRREEYDVLDKRRGRDPEMGGKPRRKNPQEGLYNELQKDKMAEAYSEIGMKGERRRGKGHDGLYQGLSTATKDTYDALHMQALPPR

SEQ ID NO: 86 - protein, 247 aa, Artificial Sequence
  Description of Artificial Sequence: Synthetic polypeptide
QVQLQESGPGLVKPSETLSLTCTVSGVSLPDYGVSWIRQPPGKGLEWIGVIWGSETTYYNSSLKSRVTISKDNSKNQVSLKLSSVTAADTAVYYCAKHYYYGGSYAMDYWGQGTLVTVSSGGGGSGGGGSGGGGSGGGGSEIVMTQSPATLSLSPGERATLSCRASQDISKYLNWYQQKPGQAPRLLIYHTSRLHSGIPARFSGSGSGTDYTLTISSLQPEDFAVYFCQQGNTLPYTFGQGTKLEIK

SEQ ID NO: 87 - DNA, 828 bp, Artificial Sequence
  Description of Artificial Sequence: Synthetic polynucleotide
atggcactgcctgtcactgccctcctgctgcctctggccctccttctgcatgccgccaggccccaagtccagctgcaagagtcaggacccggactggtgaagccgtctgagactctctcactgacttgtaccgtcagcggcgtgtccctccccgactacggagtgtcatggatccgccaacctcccgggaaagggcttgaatggattggtgtcatctggggttctgaaaccacctactacaactcttccctgaagtccagggtgaccatcagcaaggataattccaagaaccaggtcagccttaagctgtcatctgtgaccgctgctgacaccgccgtgtattactgcgccaagcactactattacggaggaagctacgctatggactattggggacagggcactctcgtgactgtgagcagcggcggtggagggtctggaggtggaggatccggtggtggtgggtcaggcggaggagggagcgagattgtgatgactcagtcaccagccaccctttctctttcacccggcgagagagcaaccctgagctgtagagccagccaggacatttctaagtacctcaactggtatcagcaaaaaccggggcaggcccctcgcctcctgatctaccatacctcacgccttcactctggtatccccgctcggtttagcggatcaggatctggtaccgactacactctgaccatttccagcctgcagccagaagatttcgcagtgtatttctgccagcagggcaatacccttccttacaccttcggtcagggaaccaagctcgaaatcaagcaccatcaccatcatcaccaccat

SEQ ID NO: 88 - protein, 276 aa, Artificial Sequence
  Description of Artificial Sequence: Synthetic polypeptide
MALPVTALLLPLALLLHAARPQVQLQESGPGLVKPSETLSLTCTVSGVSLPDYGVSWIRQPPGKGLEWIGVIWGSETTYYNSSLKSRVTISKDNSKNQVSLKLSSVTAADTAVYYCAKHYYYGGSYAMDYWGQGTLVTVSSGGGGSGGGGSGGGGSGGGGSEIVMTQSPATLSLSPGERATLSCRASQDISKYLNWYQQKPGQAPRLLIYHTSRLHSGIPARFSGSGSGTDYTLTISSLQPEDFAVYFCQQGNTLPYTFGQGTKLEIKHHHHHHHH

SEQ ID NO: 89 - DNA, 1473 bp, Artificial Sequence; identical to SEQ ID NO: 84
  Description of Artificial Sequence: Synthetic polynucleotide

SEQ ID NO: 90 - protein, 491 aa, Artificial Sequence; identical to SEQ ID NO: 85
  Description of Artificial Sequence: Synthetic polypeptide

SEQ ID NO: 91 - protein, 242 aa, Artificial Sequence
  Description of Artificial Sequence: Synthetic polypeptide
EIVMTQSPATLSLSPGERATLSCRASQDISKYLNWYQQKPGQAPRLLIYHTSRLHSGIPARFSGSGSGTDYTLTISSLQPEDFAVYFCQQGNTLPYTFGQGTKLEIKGGGGSGGGGSGGGGSQVQLQESGPGLVKPSETLSLTCTVSGVSLPDYGVSWIRQPPGKGLEWIGVIWGSETTYYNSSLKSRVTISKDNSKNQVSLKLSSVTAADTAVYYCAKHYYYGGSYAMDYWGQGTLVTVSS

SEQ ID NO: 92 - DNA, 813 bp, Artificial Sequence
  Description of Artificial Sequence: Synthetic polynucleotide
atggccctccctgtcaccgccctgctgcttccgctggctcttctgctccacgccgctcggcccgaaattgtgatgacccagtcacccgccactcttagcctttcacccggtgagcgcgcaaccctgtcttgcagagcctcccaagacatctcaaaataccttaattggtatcaacagaagcccggacaggctcctcgccttctgatctaccacaccagccggctccattctggaatccctgccaggttcagcggtagcggatctgggaccgactacaccctcactatcagctcactgcagccagaggacttcgctgtctatttctgtcagcaagggaacaccctgccctacacctttggacagggcaccaagctcgagattaaaggtggaggtggcagcggaggaggtgggtccggcggtggaggaagccaggtccaactccaagaaagcggaccgggtcttgtgaagccatcagaaactctttcactgacttgtactgtgagcggagtgtctctccccgattacggggtgtcttggatcagacagccaccggggaagggtctggaatggattggagtgatttggggctctgagactacttactacaattcatccctcaagtcacgcgtcaccatctcaaaggacaactctaagaatcaggtgtcactgaaactgtcatctgtgaccgcagccgacaccgccgtgtactattgcgctaagcattactattatggcgggagctacgcaatggattactggggacagggtactctggtcaccgtgtccagccaccaccatcatcaccatcaccat

SEQ ID NO: 93 - protein, 271 aa, Artificial Sequence
  Description of Artificial Sequence: Synthetic polypeptide
MALPVTALLLPLALLLHAARPEIVMTQSPATLSLSPGERATLSCRASQDISKYLNWYQQKPGQAPRLLIYHTSRLHSGIPARFSGSGSGTDYTLTISSLQPEDFAVYFCQQGNTLPYTFGQGTKLEIKGGGGSGGGGSGGGGSQVQLQESGPGLVKPSETLSLTCTVSGVSLPDYGVSWIRQPPGKGLEWIGVIWGSETTYYNSSLKSRVTISKDNSKNQVSLKLSSVTAADTAVYYCAKHYYYGGSYAMDYWGQGTLVTVSSHHHHHHHH

SEQ ID NO: 94 - DNA, 1473 bp, Artificial Sequence
  Description of Artificial Sequence: Synthetic polynucleotide
atggctctgcccgtgaccgcactcctcctgccactggctctgctgcttcacgccgctcgcccacaagtccagcttcaagaatcagggcctggtctggtgaagccatctgagactctgtccctcacttgcaccgtgagcggagtgtccctcccagactacggagtgagctggattagacagcctcccggaaagggactggagtggatcggagtgatttggggtagcgaaaccacttactataactcttccctgaagtcacgggtcaccatttcaaaggataactcaaagaatcaagtgagcctcaagctctcatcagtcaccgccgctgacaccgccgtgtattactgtgccaagcattactactatggagggtcctacgccatggactactggggccagggaactctggtcactgtgtcatctggtggaggaggtagcggaggaggcgggagcggtggaggtggctccggaggtggcggaagcgaaatcgtgatgacccagagccctgcaaccctgtccctttctcccggggaacgggctaccctttcttgtcgggcatcacaagatatctcaaaatacctcaattggtatcaacagaagccgggacaggcccctaggcttcttatctaccacacctctcgcctgcatagcgggattcccgcacgctttagcgggtctggaagcgggaccgactacactctgaccatctcatctctccagcccgaggacttcgccgtctacttctgccagcagggtaacaccctgccgtacaccttcggccagggcaccaagcttgagatcaaaaccactactcccgctccaaggccacccacccctgccccgaccatcgcctctcagccgctttccctgcgtccggaggcatgtagacccgcagctggtggggccgtgcatacccggggtcttgacttcgcctgcgatatctacatttgggcccctctggctggtacttgcggggtcctgctgctttcactcgtgatcactctttactgtaagcgcggtcggaagaagctgctgtacatctttaagcaacccttcatgaggcctgtgcagactactcaagaggaggacggctgttcatgccggttcccagaggaggaggaaggcggctgcgaactgcgcgtgaaattcagccgcagcgcagatgctccagcctacaagcaggggcagaaccagctctacaacgaactcaatcttggtcggagagaggagtacgacgtgctggacaagcggagaggacgggacccagaaatgggcgggaagccgcgcagaaagaatccccaagagggcctgtacaacgagctccaaaaggataagatggcagaagcctatagcgagattggtatgaaaggggaacgcagaagaggcaaaggccacgacggactgtaccagggactcagcaccgccaccaaggacacctatgacgctcttcacatgcaggccctgccgcctcgg

SEQ ID NO: 95 - protein, 491 aa, Artificial Sequence
  Description of Artificial Sequence: Synthetic polypeptide
MALPVTALLLPLALLLHAARPQVQLQESGPGLVKPSETLSLTCTVSGVSLPDYGVSWIRQPPGKGLEWIGVIWGSETTYYNSSLKSRVTISKDNSKNQVSLKLSSVTAADTAVYYCAKHYYYGGSYAMDYWGQGTLVTVSSGGGGSGGGGSGGGGSGGGGSEIVMTQSPATLSLSPGERATLSCRASQDISKYLNWYQQKPGQAPRLLIYHTSRLHSGIPARFSGSGSGTDYTLTISSLQPEDFAVYFCQQGNTLPYTFGQGTKLEIKTTTPAPRPPTPAPTIASQPLSLRPEACRPAAGGAVHTRGLDFACDIYIWAPLAGTCGVLLLSLVITLYCKRGRKKLLYIFKQPFMRPVQTTQEEDGCSCRFPEEEEGGCELRVKFSRSADAPAYKQGQNQLYNELNLGRREEYDVLDKRRGRDPEMGGKPRRKNPQEGLYNELQKDKMAEAYSEIGMKGERRRGKGHDGLYQGLSTATKDTYDALHMQALPPR

SEQ ID NO: 96 - protein, 242 aa, Artificial Sequence
  Description of Artificial Sequence: Synthetic polypeptide
QVQLQESGPGLVKPSETLSLTCTVSGVSLPDYGVSWIRQPPGKGLEWIGVIWGSETTYYNSSLKSRVTISKDNSKNQVSLKLSSVTAADTAVYYCAKHYYYGGSYAMDYWGQGTLVTVSSGGGGSGGGGSGGGGSEIVMTQSPATLSLSPGERATLSCRASQDISKYLNWYQQKPGQAPRLLIYHTSRLHSGIPARFSGSGSGTDYTLTISSLQPEDFAVYFCQQGNTLPYTFGQGTKLEIK

SEQ ID NO: 97 - DNA, 813 bp, Artificial Sequence
  Description of Artificial Sequence: Synthetic polynucleotide
atggctctgcccgtgaccgcactcctcctgccactggctctgctgcttcacgccgctcgcccacaagtccagcttcaagaatcagggcctggtctggtgaagccatctgagactctgtccctcacttgcaccgtgagcggagtgtccctcccagactacggagtgagctggattagacagcctcccggaaagggactggagtggatcggagtgatttggggtagcgaaaccacttactataactcttccctgaagtcacgggtcaccatttcaaaggataactcaaagaatcaagtgagcctcaagctctcatcagtcaccgccgctgacaccgccgtgtattactgtgccaagcattactactatggagggtcctacgccatggactactggggccagggaactctggtcactgtgtcatctggtggaggaggtagcggaggaggcgggagcggtggaggtggctccgaaatcgtgatgacccagagccctgcaaccctgtccctttctcccggggaacgggctaccctttcttgtcgggcatcacaagatatctcaaaatacctcaattggtatcaacagaagccgggacaggcccctaggcttcttatctaccacacctctcgcctgcatagcgggattcccgcacgctttagcgggtctggaagcgggaccgactacactctgaccatctcatctctccagcccgaggacttcgccgtctacttctgccagcagggtaacaccctgccgtacaccttcggccagggcaccaagcttgagatcaaacatcaccaccatcatcaccatcac

SEQ ID NO: 98 - protein, 271 aa, Artificial Sequence
  Description of Artificial Sequence: Synthetic polypeptide
MALPVTALLLPLALLLHAARPQVQLQESGPGLVKPSETLSLTCTVSGVSLPDYGVSWIRQPPGKGLEWIGVIWGSETTYYNSSLKSRVTISKDNSKNQVSLKLSSVTAADTAVYYCAKHYYYGGSYAMDYWGQGTLVTVSSGGGGSGGGGSGGGGSEIVMTQSPATLSLSPGERATLSCRASQDISKYLNWYQQKPGQAPRLLIYHTSRLHSGIPARFSGSGSGTDYTLTISSLQPEDFAVYFCQQGNTLPYTFGQGTKLEIKHHHHHHHH

SEQ ID NO: 99 - DNA, 1458 bp, Artificial Sequence
  Description of Artificial Sequence: Synthetic polynucleotide
atggccctccctgtcaccgccctgctgcttccgctggctcttctgctccacgccgctcggcccgaaattgtgatgacccagtcacccgccactcttagcctttcacccggtgagcgcgcaaccctgtcttgcagagcctcccaagacatctcaaaataccttaattggtatcaacagaagcccggacaggctcctcgccttctgatctaccacaccagccggctccattctggaatccctgccaggttcagcggtagcggatctgggaccgactacaccctcactatcagctcactgcagccagaggacttcgctgtctatttctgtcagcaagggaacaccctgccctacacctttggacagggcaccaagctcgagattaaaggtggaggtggcagcggaggaggtgggtccggcggtggaggaagccaggtccaactccaagaaagcggaccgggtcttgtgaagccatcagaaactctttcactgacttgtactgtgagcggagtgtctctccccgattacggggtgtcttggatcagacagccaccggggaagggtctggaatggattggagtgatttggggctctgagactacttactacaactcatccctcaagtcacgcgtcaccatctcaaaggacaactctaagaatcaggtgtcactgaaactgtcatctgtgaccgcagccgacaccgccgtgtactattgcgctaagcattactattatggcgggagctacgcaatggattactggggacagggtactctggtcaccgtgtccagcaccactaccccagcaccgaggccacccaccccggctcctaccatcgcctcccagcctctgtccctgcgtccggaggcatgtagacccgcagctggtggggccgtgcatacccggggtcttgacttcgcctgcgatatctacatttgggcccctctggctggtacttgcggggtcctgctgctttcactcgtgatcactctttactgtaagcgcggtcggaagaagctgctgtacatctttaagcaacccttcatgaggcctgtgcagactactcaagaggaggacggctgttcatgccggttcccagaggaggaggaaggcggctgcgaactgcgcgtgaaattcagccgcagcgcagatgctccagcctacaagcaggggcagaaccagctctacaacgaactcaatcttggtcggagagaggagtacgacgtgctggacaagcggagaggacgggacccagaaatgggcgggaagccgcgcagaaagaatccccaagagggcctgtacaacgagctccaaaaggataagatggcagaagcctatagcgagattggtatgaaaggggaacgcagaagaggcaaaggccacgacggactgtaccagggactcagcaccgccaccaaggacacctatgacgctcttcacatgcaggccctgccgcctcgg

SEQ ID NO: 100 - protein, 486 aa, Artificial Sequence
  Description of Artificial Sequence: Synthetic polypeptide
MALPVTALLLPLALLLHAARPEIVMTQSPATLSLSPGERATLSCRASQDISKYLNWYQQKPGQAPRLLIYHTSRLHSGIPARFSGSGSGTDYTLTISSLQPEDFAVYFCQQGNTLPYTFGQGTKLEIKGGGGSGGGGSGGGGSQVQLQESGPGLVKPSETLSLTCTVSGVSLPDYGVSWIRQPPGKGLEWIGVIWGSETTYYNSSLKSRVTISKDNSKNQVSLKLSSVTAADTAVYYCAKHYYYGGSYAMDYWGQGTLVTVSSTTTPAPRPPTPAPTIASQPLSLRPEACRPAAGGAVHTRGLDFACDIYIWAPLAGTCGVLLLSLVITLYCKRGRKKLLYIFKQPFMRPVQTTQEEDGCSCRFPEEEEGGCELRVKFSRSADAPAYKQGQNQLYNELNLGRREEYDVLDKRRGRDPEMGGKPRRKNPQEGLYNELQKDKMAEAYSEIGMKGERRRGKGHDGLYQGLSTATKDTYDALHMQALPPR

SEQ ID NO: 101 - DNA, 813 bp, Artificial Sequence
  Description of Artificial Sequence: Synthetic polynucleotide
atggccctgcccgtcaccgctctgctgctgccccttgctctgcttcttcatgcagcaaggccggacatccagatgacccaaaccacctcatccctctctgcctctcttggagacagggtgaccatttcttgtcgcgccagccaggacatcagcaagtatctgaactggtatcagcagaagccggacggaaccgtgaagctcctgatctaccatacctctcgcctgcatagcggcgtgccctcacgcttctctggaagcggatcaggaaccgattattctctcactatttcaaatcttgagcaggaagatattgccacctatttctgccagcagggtaataccctgccctacaccttcggaggagggaccaagctcgaaatcaccggtggaggaggcagcggcggtggagggtctggtggaggtggttctgaggtgaagctgcaagaatcaggccctggacttgtggccccttcacagtccctgagcgtgacttgcaccgtgtccggagtctccctgcccgactacggagtgtcatggatcagacaacctccacggaaaggactggaatggctcggtgtcatctggggtagcgaaactacttactacaattcagccctcaaaagcaggctgactattatcaaggacaacagcaagtcccaagtctttcttaagatgaactcactccagactgacgacaccgcaatctactattgtgctaagcactactactacggaggatcctacgctatggattactggggacaaggtacttccgtcactgtctcttcacaccatcatcaccatcaccatcac

SEQ ID NO: 102 - protein, 271 aa, Artificial Sequence
  Description of Artificial Sequence: Synthetic polypeptide
MALPVTALLLPLALLLHAARPDIQMTQTTSSLSASLGDRVTISCRASQDISKYLNWYQQKPDGTVKLLIYHTSRLHSGVPSRFSGSGSGTDYSLTISNLEQEDIATYFCQQGNTLPYTFGGGTKLEITGGGGSGGGGSGGGGSEVKLQESGPGLVAPSQSLSVTCTVSGVSLPDYGVSWIRQPPRKGLEWLGVIWGSETTYYNSALKSRLTIIKDNSKSQVFLKMNSLQTDDTAIYYCAKHYYYGGSYAMDYWGQGTSVTVSSHHHHHHHH

SEQ ID NO: 103 - DNA, 1458 bp, Artificial Sequence
  Description of Artificial Sequence: Synthetic polynucleotide
atggccttaccagtgaccgccttgctcctgccgctggccttgctgctccacgccgccaggccggacatccagatgacacagactacatcctccctgtctgcctctctgggagacagagtcaccatcagttgcagggcaagtcaggacattagtaaatatttaaattggtatcagcagaaaccagatggaactgttaaactcctgatctaccatacatcaagattacactcaggagtcccatcaaggttcagtggcagtgggtctggaacagattattctctcaccattagcaacctggagcaagaagatattgccacttacttttgccaacagggtaatacgcttccgtacacgttcggaggggggaccaagctggagatcacaggtggcggtggctcgggcggtggtgggtcgggtggcggcggatctgaggtgaaactgcaggagtcaggacctggcctggtggcgccctcacagagcctgtccgtcacatgcactgtctcaggggtctcattacccgactatggtgtaagctggattcgccagcctccacgaaagggtctggagtggctgggagtaatatggggtagtgaaaccacatactataattcagctctcaaatccagactgaccatcatcaaggacaactccaagagccaagttttcttaaaaatgaacagtctgcaaactgatgacacagccatttactactgtgccaaacattattactacggtggtagctatgctatggactactggggccaaggaacctcagtcaccgtctcctcaaccacgacgccagcgccgcgaccaccaacaccggcgcccaccatcgcgtcgcagcccctgtccctgcgcccagaggcgtgccggccagcggcggggggcgcagtgcacacgagggggctggacttcgcctgtgatatctacatctgggcgcccttggccgggacttgtggggtccttctcctgtcactggttatcaccctttactgcaaacggggcagaaagaaactcctgtatatattcaaacaaccatttatgagaccagtacaaactactcaagaggaagatggctgtagctgccgatttccagaagaagaagaaggaggatgtgaactgagagtgaagttcagcaggagcgcagacgcccccgcgtacaagcagggccagaaccagctctataacgagctcaatctaggacgaagagaggagtacgatgttttggacaagagacgtggccgggaccctgagatggggggaaagccgagaaggaagaaccctcaggaaggcctgtacaatgaactgcagaaagataagatggcggaggcctacagtgagattgggatgaaaggcgagcgccggaggggcaaggggcacgatggcctttaccagggtctcagtacagccaccaaggacacctacgacgcccttcacatgcaggccctgccccctcgc

SEQ ID NO: 104 - protein, 486 aa, Artificial Sequence; identical to SEQ ID NO: 39
  Description of Artificial Sequence: Synthetic polypeptide

SEQ ID NO: 105 - protein, 242 aa, Artificial Sequence
  Description of Artificial Sequence: Synthetic polypeptide
DIQMTQTTSSLSASLGDRVTISCRASQDISKYLNWYQQKPDGTVKLLIYHTSRLHSGVPSRFSGSGSGTDYSLTISNLEQEDIATYFCQQGNTLPYTFGGGTKLEITGGGGSGGGGSGGGGSEVKLQESGPGLVAPSQSLSVTCTVSGVSLPDYGVSWIRQPPRKGLEWLGVIWGSETTYYNSALKSRLTIIKDNSKSQVFLKMNSLQTDDTAIYYCAKHYYYGGSYAMDYWGQGTSVTVSS

SEQ ID NO: 106 - protein, 244 aa, Artificial Sequence
  Description of Artificial Sequence: Synthetic polypeptide
QVQLLESGAELVRPGSSVKISCKASGYAFSSYWMNWVKQRPGQGLEWIGQIYPGDGDTNYNGKFKGQATLTADKSSSTAYMQLSGLTSEDSAVYSCARKTISSVVDFYFDYWGQGTTVTGGGSGGGSGGGSGGGSELVLTQSPKFMSTSVGDRVSVTCKASQNVGTNVAWYQQKPGQSPKPLIYSATYRNSGVPDRFTGSGSGTDFTLTITNVQSKDLADYFCQYNRYPYTSFFFTKLEIKRRS

SEQ ID NO: 107 - protein, 464 aa, Artificial Sequence
  Description of Artificial Sequence: Synthetic polypeptide
QVQLLESGAELVRPGSSVKISCKASGYAFSSYWMNWVKQRPGQGLEWIGQIYPGDGDTNYNGKFKGQATLTADKSSSTAYMQLSGLTSEDSAVYSCARKTISSVVDFYFDYWGQGTTVTGGGSGGGSGGGSGGGSELVLTQSPKFMSTSVGDRVSVTCKASQNVGTNVAWYQQKPGQSPKPLIYSATYRNSGVPDRFTGSGSGTDFTLTITNVQSKDLADYFCQYNRYPYTSFFFTKLEIKRRSKIEVMYPPPYLDNEKSNGTIIHVKGKHLCPSPLFPGPSKPFWVLVVVGGVLACYSLLVTVAFIIFWVRSKRSRLLHSDYMNMTPRRPGPTRKHYQPYAPPRDFAAYRSRVKFSRSADAPAYQQGQNQLYNELNLGRREEYDVLDKRRGRDPEMGGKPRRKNPQEGLYNELQKDKMAEAYSEIGMKGERRRGKGHDGLYQGLSTATKDTYDALHMQALPPR

SEQ ID NO: 108 - protein, 246 aa, Artificial Sequence
  Description of Artificial Sequence: Synthetic polypeptide
DIQMTQTTSSLSASLGDRVTISCRASQDISKYLNWYQQKPDGTVKLLIYHTSRLHSGVPSRFSGSGSGTDYSLTISNLEQEDIATYFCQQGNTLPYTFGGGTKLEITGSTSGSGKPGSGEGSTKGEVKLQESGPGLVAPSQSLSVTCTVSGVSLPDYGVSWIRQPPRKGLEWLGVIWGSETTYYNSALKSRLTIIKDNSKSQVFLKMNSLQTDDTAIYYCAKHYYYGGSYAMDYWGQGTSVTVSSE

SEQ ID NO: 109 - protein, 439 aa, Artificial Sequence
  Description of Artificial Sequence: Synthetic polypeptide
DIQMTQTTSSLSASLGDRVTISCRASQDISKYLNWYQQKPDGTVKLLIYHTSRLHSGVPSRFSGSGSGTDYSLTISNLEQEDIATYFCQQGNTLPYTFGGGTKLEITGSTSGSGKPGSGEGSTKGEVKLQESGPGLVAPSQSLSVTCTVSGVSLPDYGVSWIRQPPRKGLEWLGVIWGSETTYYNSALKSRLTIIKDNSKSQVFLKMNSLQTDDTAIYYCAKHYYYGGSYAMDYWGQGTSVTVSSESKYGPPCPPCPMFWVLVVVGGVLACYSLLVTVAFIIFWVKRGRKKLLYIFKQPFMRPVQTTQEEDGCSCRFEEEEGGCELRVKFSRSADAPAYQQGQNQLYNELNLGRREEYDVLDKRRGRDPEMGGKPRRKNPQEGLYNELQKDKMAEAYSEIGMKGERRRGKGHDGLYQGLSTATKDTYDALHMQALPPRL

SEQ ID NO: 110 - protein, 819 aa, Artificial Sequence
  Description of Artificial Sequence: Synthetic polypeptide
DIQMTQTTSSLSASLGDRVTISCRASQDISKYLNWYQQKPDGTVKLLIYHTSRLHSGVPSRFSGSGSGTDYSLTISNLEQEDIATYFCQQGNTLPYTFGGGTKLEITGSTSGSGKPGSGEGSTKGEVKLQESGPGLVAPSQSLSVTCTVSGVSLPDYGVSWIRQPPRKGLEWLGVIWGSETTYYNSALKSRLTIIKDNSKSQVFLKMNSLQTDDTAIYYCAKHYYYGGSYAMDYWGQGTSVTVSSESKYGPPCPPCPMFWVLVVVGGVLACYSLLVTVAFIIFWVKRGRKKLLYIFKQPFMRPVQTTQEEDGCSCRFEEEEGGCELRVKFSRSADAPAYQQGQNQLYNELNLGRREEYDVLDKRRGRDPEMGGKPRRKNPQEGLYNELQKDKMAEAYSEIGMKGERRRGKGHDGLYQGLSTATKDTYDALHMQALPPRLEGGGEGRGSLLTCGDVEENPGPRMLLLVTSLLLCELPHPAFLLIPRKVCNGIGIGEFKDSLSINATNIKHFKNCTSISGDLHILPVAFRGDSFTHTPPLDPQELDILKTVKEITGFLLIQAWPENRTDLHAFENLEIIRGRTKQHGQFSLAVVSLNITSLGLRSLKEISDGDVIISGNKNLCYANTINWKKLFGTSGQKTKIISNRGENSCKATGQVCHALCSPEGCWGPEPRDCVSCRNVSRGRECVDKCNLLEGEPREFVENSECIQCHPECLPQAMNITCTGRGPDNCIQCAHYIDGPHCVKTCPAGVMGENNTLVWKYADAGHVCHLCHPNCTYGCTGPGLEGCPTNGPKIPSIATGMVGALLLLLVVALGIGLFM

SEQ ID NO: 111 - protein, 245 aa, Artificial Sequence
  Description of Artificial Sequence: Synthetic polypeptide
DIQMTQTTSSLSASLGDRVTISCRASQDISKYLNWYQQKPDGTVKLLIYHTSRLHSGVPSRFSGSGSGTDYSLTISNLEQEDIATYFCQQGNTLPYTFGGGTKLEITGSTSGSGKPGSGEGSTKGEVKLQESGPGLVAPSQSLSVTCTVSGVSLPDYGVSWIRQPPRKGLEWLGVIWGSETTYYNSALKSRLTIIKDNSKSQVFLKMNSLQTDDTAIYYCAKHYYYGGSYAMDYWGQGTSVTVSS

SEQ ID NO: 112 - protein, 467 aa, Artificial Sequence
  Description of Artificial Sequence: Synthetic polypeptide
DIQMTQTTSSLSASLGDRVTISCRASQDISKYLNWYQQKPDGTVKLLIYHTSRLHSGVPSRFSGSGSGTDYSLTISNLEQEDIATYFCQQGNTLPYTFGGGTKLEITGSTSGSGKPGSGEGSTKGEVKLQESGPGLVAPSQSLSVTCTVSGVSLPDYGVSWIRQPPRKGLEWLGVIWGSETTYYNSALKSRLTIIKDNSKSQVFLKMNSLQTDDTAIYYCAKHYYYGGSYAMDYWGQGTSVTVSSAAAIEVMYPPPYLDNEKSNGTIIHVKGKHLCPSPLFPGPSKPFWVLVVVGGVLACYSLLVTVAFIIFWVRSKRSRLLHSDYMNMTPRRPGPTRKHYQPYAPPRDFAAYRSRVKFSRSADAPAYQQGQNQLYNELNLGRREEYDVLDKRRGRDPEMGGKPRRKNPQEGLYNELQKDKMAEAYSEIGMKGERRRGKGHDGLYQGLSTATKDTYDALHMQALPPR

SEQ ID NO: 113 - protein, 119 aa, Artificial Sequence
  Description of Artificial Sequence: Synthetic polypeptide
QVQLLESGAELVRPGSSVKISCKASGYAFSSYWMNWVKQRPGQGLEWIGQIYPGDGDTNYNGKFKGQATLTADKSSSTAYMQLSGLTSEDSAVYSCARKTISSVVDFYFDYWGQGTTVT

SEQ ID NO: 114 - protein, 111 aa, Artificial Sequence
  Description of Artificial Sequence: Synthetic polypeptide
ELVLTQSPKFMSTSVGDRVSVTCKASQNVGTNVAWYQQKPGQSPKPLIYSATYRNSGVPDRFTGSGSGTDFTLTITNVQSKDLADYFYFCQYNRYPYTSGGGTKLEIKRRS

SEQ ID NO: 115 - protein, 5 aa, Artificial Sequence
  Description of Artificial Sequence: Synthetic peptide
DYGVS

SEQ ID NO: 116 - protein, 16 aa, Artificial Sequence
  Description of Artificial Sequence: Synthetic peptide
VIWGSETTYYNSALKS

SEQ ID NO: 117 - protein, 12 aa, Artificial Sequence
  Description of Artificial Sequence: Synthetic peptide
HYYYGGSYAMDY

SEQ ID NO: 118 - protein, 5 aa, Artificial Sequence
  Description of Artificial Sequence: Synthetic peptide
DYGVS

SEQ ID NO: 119 - protein, 16 aa, Artificial Sequence
  Description of Artificial Sequence: Synthetic peptide
VIWGSETTYYSSSLKS

SEQ ID NO: 120 - protein, 12 aa, Artificial Sequence
  Description of Artificial Sequence: Synthetic peptide
HYYYGGSYAMDY

SEQ ID NO: 121 - protein, 5 aa, Artificial Sequence
  Description of Artificial Sequence: Synthetic peptide
DYGVS

SEQ ID NO: 122 - protein, 16 aa, Artificial Sequence
  Description of Artificial Sequence: Synthetic peptide
VIWGSETTYYQSSLKS

SEQ ID NO: 123 - protein, 12 aa, Artificial Sequence
  Description of Artificial Sequence: Synthetic peptide
HYYYGGSYAMDY

SEQ ID NO: 124 - protein, 5 aa, Artificial Sequence
  Description of Artificial Sequence: Synthetic peptide
DYGVS

SEQ ID NO: 125 - protein, 16 aa, Artificial Sequence
  Description of Artificial Sequence: Synthetic peptide
VIWGSETTYYNSSLKS

SEQ ID NO: 126 - protein, 12 aa, Artificial Sequence
  Description of Artificial Sequence: Synthetic peptide
HYYYGGSYAMDY

SEQ ID NO: 127 - protein, 11 aa, Artificial Sequence
  Description of Artificial Sequence: Synthetic peptide
RASQDISKYLN

SEQ ID NO: 128 - protein, 7 aa, Artificial Sequence
  Description of Artificial Sequence: Synthetic peptide
HTSRLHS

SEQ ID NO: 129 - protein, 9 aa, Artificial Sequence
  Description of Artificial Sequence: Synthetic peptide
QQGNTLPYT

SEQ ID NO: 130 - protein, 239 aa, Artificial Sequence
  Description of Artificial Sequence: Synthetic polypeptide
EVQLVESGGGLVQPGGSLRLSCAVSGFALSNHGMSWVRRAPGKGLEWVSGIVYSGSTYYAASVKGRFTISRDNSRNTLYLQMNSLRPEDTAIYYCSAHGGESDVWGQGTTVTVSSASGGGGSGGRASGGGGSDIQLTQSPSSLSASVGDRVTITCRASQSISSYLNWYQQKPGKAPKLLIYAASSLQSGVPSRFSGSGSGTDFTLTISSLQPEDFATYYCQQSYSTPYTFGQGTKVEIK

SEQ ID NO: 131 - DNA, 717 bp, Artificial Sequence
  Description of Artificial Sequence: Synthetic polynucleotide
gaagtgcaattggtggaatcagggggaggacttgtgcagcctggaggatcgctgagactgtcatgtgccgtgtccggctttgccctgtccaaccacgggatgtcctgggtccgccgcgcgcctggaaagggcctcgaatgggtgtcgggtattgtgtacagcggtagcacctactatgccgcatccgtgaaggggagattcaccatcagccgggacaactccaggaacactctgtacctccaaatgaattcgctgaggccagaggacactgccatctactactgctccgcgcatggcggagagtccgacgtctggggacaggggaccaccgtgaccgtgtctagcgcgtccggcggaggcggcagcgggggtcgggcatcagggggcggcggatcggacatccagctcacccagtccccgagctcgctgtccgcctccgtgggagatcgggtcaccatcacgtgccgcgccagccagtcgatttcctcctacctgaactggtaccaacagaagcccggaaaagccccgaagcttctcatctacgccgcctcgagcctgcagtcaggagtgccctcacggttctccggctccggttccggtactgatttcaccctgaccatttcctccctgcaaccggaggacttcgctacttactactgccagcagtcgtactccaccccctacactttcggacaaggcaccaaggtcgaaatcaag

SEQ ID NO: 132 - protein, 115 aa, Artificial Sequence
  Description of Artificial Sequence: Synthetic polypeptide
EVQLVESGGGLVQPGGSLRLSCAVSGFALSNHGMSWVRRAPGKGLEWVSGIVYSGSTYYAASVKGRFTISRDNSRNTLYLQMNSLRPEDTAIYYCSAHGGESDVWGQGTTVTVSS

SEQ ID NO: 133 - protein, 107 aa, Artificial Sequence
  Description of Artificial Sequence: Synthetic polypeptide
DIQLTQSPSSLSASVGDRVTITCRASQSISSYLNWYQQKPGKAPKLLIYAASSLQSGVPSRFSGSGSGTDFTLTISSLQPEDFATYYCQQSYSTPYTFGQGTKVEIK

SEQ ID NO: 134 - protein, 483 aa, Artificial Sequence
  Description of Artificial Sequence: Synthetic polypeptide
MALPVTALLLPLALLLHAARPEVQLVESGGGLVQPGGSLRLSCAVSGFALSNHGMSWVRRAPGKGLEWVSGIVYSGSTYYAASVKGRFTISRDNSRNTLYLQMNSLRPEDTAIYYCSAHGGESDVWGQGTTVTVSSASGGGGSGGRASGGGGSDIQLTQSPSSLSASVGDRVTITCRASQSISSYLNWYQQKPGKAPKLLIYAASSLQSGVPSRFSGSGSGTDFTLTISSLQPEDFATYYCQQSYSTPYTFGQGTKVEIKTTTPAPRPPTPAPTIASQPLSLRPEACRPAAGGAVHTRGLDFACDIYIWAPLAGTCGVLLLSLVITLYCKRGRKKLLYIFKQPFMRPVQTTQEEDGCSCRFPEEEEGGCELRVKFSRSADAPAYKQGQNQLYNELNLGRREEYDVLDKRRGRDPEMGGKPRRKNPQEGLYNELQKDKMAEAYSEIGMKGERRRGKGHDGLYQGLSTATKDTYDALHMQALPPR

SEQ ID NO: 135 - DNA, 1449 bp, Artificial Sequence
  Description of Artificial Sequence: Synthetic polynucleotide
atggccctccctgtcaccgccctgctgcttccgctggctcttctgctccacgccgctcggcccgaagtgcaattggtggaatcagggggaggacttgtgcagcctggaggatcgctgagactgtcatgtgccgtgtccggctttgccctgtccaaccacgggatgtcctgggtccgccgcgcgcctggaaagggcctcgaatgggtgtcgggtattgtgtacagcggtagcacctactatgccgcatccgtgaaggggagattcaccatcagccgggacaactccaggaacactctgtacctccaaatgaattcgctgaggccagaggacactgccatctactactgctccgcgcatggcggagagtccgacgtctggggacaggggaccaccgtgaccgtgtctagcgcgtccggcggaggcggcagcgggggtcgggcatcagggggcggcggatcggacatccagctcacccagtccccgagctcgctgtccgcctccgtgggagatcgggtcaccatcacgtgccgcgccagccagtcgatttcctcctacctgaactggtaccaacagaagcccggaaaagccccgaagcttctcatctacgccgcctcgagcctgcagtcaggagtgccctcacggttctccggctccggttccggtactgatttcaccctgaccatttcctccctgcaaccggaggacttcgctacttactactgccagcagtcgtactccaccccctacactttcggacaaggcaccaaggtcgaaatcaagaccactaccccagcaccgaggccacccaccccggctcctaccatcgcctcccagcctctgtccctgcgtccggaggcatgtagacccgcagctggtggggccgtgcatacccggggtcttgacttcgcctgcgatatctacatttgggcccctctggctggtacttgcggggtcctgctgctttcactcgtgatcactctttactgtaagcgcggtcggaagaagctgctgtacatctttaagcaacccttcatgaggcctgtgcagactactcaagaggaggacggctgttcatgccggttcccagaggaggaggaaggcggctgcgaactgcgcgtgaaattcagccgcagcgcagatgctccagcctacaagcaggggcagaaccagctctacaacgaactcaatcttggtcggagagaggagtacgacgtgctggacaagcggagaggacgggacccagaaatgggcgggaagccgcgcagaaagaatccccaagagggcctgtacaacgagctccaaaaggataagatggcagaagcctatagcgagattggtatgaaaggggaacgcagaagaggcaaaggccacgacggactgtaccagggactcagcaccgccaccaaggacacctatgacgctcttcacatgcaggccctgccgcctcgg

SEQ ID NO: 136 - protein, 246 aa, Artificial Sequence
  Description of Artificial Sequence: Synthetic polypeptide
QVQLVESGGGLVQPGRSLRLSCAASGFTFSNYAMSWVRQAPGKGLGWVSGISRSGENTYYADSVKGRFTISRDNSKNTLYLQMNSLRDEDTAVYYCARSPAHYYGGMDVWGQGTTVTVSSASGGGGSGGRASGGGGSDIVLTQSPGTLSLSPGERATLSCRASQSISSSFLAWYQQKPGQAPRLLIYGASRRATGIPDRFSGSGSGTDFTLTISRLEPEDSAVYYCQQYHSSPSWTFGQGTKLEIK

SEQ ID NO: 137 - DNA, 738 bp, Artificial Sequence
  Description of Artificial Sequence: Synthetic polynucleotide
caagtgcaactcgtggaatctggtggaggactcgtgcaacccggaagatcgcttagactgtcgtgtgccgccagcgggttcactttctcgaactacgcgatgtcctgggtccgccaggcacccggaaagggactcggttgggtgtccggcatttcccggtccggcgaaaatacctactacgccgactccgtgaagggccgcttcaccatctcaagggacaacagcaaaaacaccctgtacttgcaaatgaactccctgcgggatgaagatacagccgtgtactattgcgcccggtcgcctgcccattactacggcggaatggacgtctggggacagggaaccactgtgactgtcagcagcgcgtcgggtggcggcggctcagggggtcgggcctccggggggggagggtccgacatcgtgctgacccagtccccgggaaccctgagcctgagcccgggagagcgcgcgaccctgtcatgccgggcatcccagagcattagctcctcctttctcgcctggtatcagcagaagcccggacaggccccgaggctgctgatctacggcgctagcagaagggctaccggaatcccagaccggttctccggctccggttccgggaccgatttcacccttactatctcgcgcctggaacctgaggactccgccgtctactactgccagcagtaccactcatccccgtcgtggacgttcggacagggcaccaagctggagattaag

SEQ ID NO: 138 - protein, 120 aa, Artificial Sequence
  Description of Artificial Sequence: Synthetic polypeptide
QVQLVESGGGLVQPGRSLRLSCAASGFTFSNYAMSWVRQAPGKGLGWVSGISRSGENTYYADSVKGRFTISRDNSKNTLYLQMNSLRDEDTAVYYCARSPAHYYGGMDVWGQGTTVTVSS

SEQ ID NO: 139 - protein, 109 aa, Artificial Sequence
  Description of Artificial Sequence: Synthetic polypeptide
DIVLTQSPGTLSLSPGERATLSCRASQSISSSFLAWYQQKPGQAPRLLIYGASRRATGIPDRFSGSGSGTDFTLTISRLEPEDSAVYYCQQYHSSPSWTFGQGTKLEIK

SEQ ID NO: 140 - protein, 490 aa, Artificial Sequence
  Description of Artificial Sequence: Synthetic polypeptide
MALPVTALLLPLALLLHAARPQVQLVESGGGLVQPGRSLRLSCAASGFTFSNYAMSWVRQAPGKGLGWVSGISRSGENTYYADSVKGRFTISRDNSKNTLYLQMNSLRDEDTAVYYCARSPAHYYGGMDVWGQGTTVTVSSASGGGGSGGRASGGGGSDIVLTQSPGTLSLSPGERATLSCRASQSISSSFLAWYQQKPGQAPRLLIYGASRRATGIPDRFSGSGSGTDFTLTISRLEPEDSAVYYCQQYHSSPSWTFGQGTKLEIKTTTPAPRPPTPAPTIASQPLSLRPEACRPAAGGAVHTRGLDFACDIYIWAPLAGTCGVLLLSLVITLYCKRGRKKLLYIFKQPFMRPVQTTQEEDGCSCRFPEEEEGGCELRVKFSRSADAPAYKQGQNQLYNELNLGRREEYDVLDKRRGRDPEMGGKPRRKNPQEGLYNELQKDKMAEAYSEIGMKGERRRGKGHDGLYQGLSTATKDTYDALHMQALPPR

SEQ ID NO: 141 - DNA, 1470 bp, Artificial Sequence
  Description of Artificial Sequence: Synthetic polynucleotide
atggccctccctgtcaccgccctgctgcttccgctggctcttctgctccacgccgctcggccccaagtgcaactcgtggaatctggtggaggactcgtgcaacccggaagatcgcttagactgtcgtgtgccgccagcgggttcactttctcgaactacgcgatgtcctgggtccgccaggcacccggaaagggactcggttgggtgtccggcatttcccggtccggcgaaaatacctactacgccgactccgtgaagggccgcttcaccatctcaagggacaacagcaaaaacaccctgtacttgcaaatgaactccctgcgggatgaagatacagccgtgtactattgcgcccggtcgcctgcccattactacggcggaatggacgtctggggacagggaaccactgtgactgtcagcagcgcgtcgggtggcggcggctcagggggtcgggcctccggggggggagggtccgacatcgtgctgacccagtccccgggaaccctgagcctgagcccgggagagcgcgcgaccctgtcatgccgggcatcccagagcattagctcctcctttctcgcctggtatcagcagaagcccggacaggccccgaggctgctgatctacggcgctagcagaagggctaccggaatcccagaccggttctccggctccggttccgggaccgatttcacccttactatctcgcgcctggaacctgaggactccgccgtctactactgccagcagtaccactcatccccgtcgtggacgttcggacagggcaccaagctggagattaagaccactaccccagcaccgaggccacccaccccggctcctaccatcgcctcccagcctctgtccctgcgtccggaggcatgtagacccgcagctggtggggccgtgcatacccggggtcttgacttcgcctgcgatatctacatttgggcccctctggctggtacttgcggggtcctgctgctttcactcgtgatcactctttactgtaagcgcggtcggaagaagctgctgtacatctttaagcaacccttcatgaggcctgtgcagactactcaagaggaggacggctgttcatgccggttcccagaggaggaggaaggcggctgcgaactgcgcgtgaaattcagccgcagcgcagatgctccagcctacaagcaggggcagaaccagctctacaacgaactcaatcttggtcggagagaggagtacgacgtgctggacaagcggagaggacgggacccagaaatgggcgggaagccgcgcagaaagaatccccaagagggcctgtacaacgagctccaaaaggataagatggcagaagcctatagcgagattggtatgaaaggggaacgcagaagaggcaaaggccacgacggactgtaccagggactcagcaccgccaccaaggacacctatgacgctcttcacatgcaggccctgccgcctcgg

SEQ ID NO: 142 - protein, 244 aa, Artificial Sequence
  Description of Artificial Sequence: Synthetic polypeptide
QVQLVESGGGLVQPGRSLRLSCAASGFTFDDYAMHWVRQAPGKGLEWVSGISWNSGSIGYADSVKGRFTISRDNAKNSLYLQMNSLRAEDTALYYCSVHSFLAYWGQGTLVTVSSASGGGGSGGRASGGGGSDIVMTQTPLSLPVTPGEPASISCRSSQSLLHSNGYNYLDWYLQKPGQSPQLLIYLGSNRASGVPDRFSGSGSGTDFTLKISRVEAEDVGVYYCMQALQTPYTFGQGTKVEIK

SEQ ID NO: 143 - DNA, 732 bp, Artificial Sequence
  Description of Artificial Sequence: Synthetic polynucleotide
caagtgcaactcgtcgaatccggtggaggtctggtccaacctggtagaagcctgagactgtcgtgtgcggccagcggattcacctttgatgactatgctatgcactgggtgcggcaggccccaggaaagggcctggaatgggtgtcgggaattagctggaactccgggtccattggctacgccgactccgtgaagggccgcttcaccatctcccgcgacaacgcaaagaactccctgtacttgcaaatgaactcgctcagggctgaggataccgcgctgtactactgctccgtgcattccttcctggcctactggggacagggaactctggtcaccgtgtcgagcgcctccggcggcgggggctcgggtggacgggcctcgggcggaggggggtccgacatcgtgatgacccagaccccgctgagcttgcccgtgactcccggagagcctgcatccatctcctgccggtcatcccagtcccttctccactccaacggatacaactacctcgactggtacctccagaagccgggacagagccctcagcttctgatctacctggggtcaaatagagcctcaggagtgccggatcggttcagcggatctggttcgggaactgatttcactctgaagatttcccgcgtggaagccgaggacgtgggcgtctactactgtatgcaggcgctgcagaccccctataccttcggccaagggacgaaagtggagatcaag

SEQ ID NO: 144 - protein, 115 aa, Artificial Sequence
  Description of Artificial Sequence: Synthetic polypeptide
QVQLVESGGGLVQPGRSLRLSCAASGFTFDDYAMHWVRQAPGKGLEWVSGISWNSGSIGYADSVKGRFTISRDNAKNSLYLQMNSLRAEDTALYYCSVHSFLAYWGQGTLVTVSS

SEQ ID NO: 145 - protein, 112 aa, Artificial Sequence
  Description of Artificial Sequence: Synthetic polypeptide
DIVMTQTPLSLPVTPGEPASISCRSSQSLLHSNGYNYLDWYLQKPGQSPQLLIYLGSNRASGVPDRFSGSGSGTDFTLKISRVEAEDVGVYYCMQALQTPYTFGQGTKVEIK

SEQ ID NO: 146 - protein, 488 aa, Artificial Sequence
  Description of Artificial Sequence: Synthetic polypeptide
MALPVTALLLPLALLLHAARPQVQLVESGGGLVQPGRSLRLSCAASGFTFDDYAMHWVRQAPGKGLEWVSGISWNSGSIGYADSVKGRFTISRDNAKNSLYLQMNSLRAEDTALYYCSVHSFLAYWGQGTLVTVSSASGGGGSGGRASGGGGSDIVMTQTPLSLPVTPGEPASISCRSSQSLLHSNGYNYLDWYLQKPGQSPQLLIYLGSNRASGVPDRFSGSGSGTDFTLKISRVEAEDVGVYYCMQALQTPYTFGQGTKVEIKTTTPAPRPPTPAPTIASQPLSLRPEACRPAAGGAVHTRGLDFACDIYIWAPLAGTCGVLLLSLVITLYCKRGRKKLLYIFKQPFMRPVQTTQEEDGCSCRFPEEEEGGCELRVKFSRSADAPAYKQGQNQLYNELNLGRREEYDVLDKRRGRDPEMGGKPRRKNPQEGLYNELQKDKMAEAYSEIGMKGERRRGKGHDGLYQGLSTATKDTYDALHMQALPPR

SEQ ID NO: 147 - DNA, 1464 bp, Artificial Sequence
  Description of Artificial Sequence: Synthetic polynucleotide
atggccctccctgtcaccgccctgctgcttccgctggctcttctgctccacgccgctcggccccaagtgcaactcgtcgaatccggtggaggtctggtccaacctggtagaagcctgagactgtcgtgtgcggccagcggattcacctttgatgactatgctatgcactgggtgcggcaggccccaggaaagggcctggaatgggtgtcgggaattagctggaactccgggtccattggctacgccgactccgtgaagggccgcttcaccatctcccgcgacaacgcaaagaactccctgtacttgcaaatgaactcgctcagggctgaggataccgcgctgtactactgctccgtgcattccttcctggcctactggggacagggaactctggtcaccgtgtcgagcgcctccggcggcgggggctcgggtggacgggcctcgggcggaggggggtccgacatcgtgatgacccagaccccgctgagcttgcccgtgactcccggagagcctgcatccatctcctgccggtcatcccagtcccttctccactccaacggatacaactacctcgactggtacctccagaagccgggacagagccctcagcttctgatctacctggggtcaaatagagcctcaggagtgccggatcggttcagcggatctggttcgggaactgatttcactctgaagatttcccgcgtggaagccgaggacgtgggcgtctactactgtatgcaggcgctgcagaccccctataccttcggccaagggacgaaagtggagatcaagaccactaccccagcaccgaggccacccaccccggctcctaccatcgcctcccagcctctgtccctgcgtccggaggcatgtagacccgcagctggtggggccgtgcatacccggggtcttgacttcgcctgcgatatctacatttgggcccctctggctggtacttgcggggtcctgctgctttcactcgtgatcactctttactgtaagcgcggtcggaagaagctgctgtacatctttaagcaacccttcatgaggcctgtgcagactactcaagaggaggacggctgttcatgccggttcccagaggaggaggaaggcggctgcgaactgcgcgtgaaattcagccgcagcgcagatgctccagcctacaagcaggggcagaaccagctctacaacgaactcaatcttggtcggagagaggagtacgacgtgctggacaagcggagaggacgggacccagaaatgggcgggaagccgcgcagaaagaatccccaagagggcctgtacaacgagctccaaaaggataagatggcagaagcctatagcgagattggtatgaaaggggaacgcagaagaggcaaaggccacgacggactgtaccagggactcagcaccgccaccaaggacacctatgacgctcttcacatgcaggccctgccgcctcgg

SEQ ID NO: 148 - protein, 243 aa, Artificial Sequence
  Description of Artificial Sequence: Synthetic polypeptide
EVQLLESGGGLVQPGGSLRLSCAVSGFALSNHGMSWVRRAPGKGLEWVSGIVYSGSTYYAASVKGRFTISRDNSRNTLYLQMNSLRPEDTAIYYCSAHGGESDVWGQGTTVTVSSASGGGGSGGRASGGGGSDIVMTQTPLSLSVTPGQPASISCKSSQSLLRNDGKTPLYWYLQKAGQPPQLLIYEVSNRFSGVPDRFSGSGSGTDFTLKISRVEAEDVGAYYCMQNIQFPSFGGGTKLEIK

SEQ ID NO: 149 - DNA, 729 bp, Artificial Sequence
  Description of Artificial Sequence: Synthetic polynucleotide
gaagtgcaattgttggaatctggaggaggacttgtgcagcctggaggatcactgagactttcgtgtgcggtgtcaggcttcgccctgagcaaccacggcatgagctgggtgcggagagccccggggaagggtctggaatgggtgtccgggatcgtctactccggttcaacttactacgccgcaagcgtgaagggtcgcttcaccatttcccgcgataactcccggaacaccctgtacctccaaatgaactccctgcggcccgaggacaccgccatctactactgttccgcgcatggaggagagtccgatgtctggggacagggcactaccgtgaccgtgtcgagcgcctcggggggaggaggctccggcggtcgcgcctccggggggggtggcagcgacattgtgatgacgcagactccactctcgctgtccgtgaccccgggacagcccgcgtccatctcgtgcaagagctcccagagcctgctgaggaacgacggaaagactcctctgtattggtacctccagaaggctggacagcccccgcaactgctcatctacgaagtgtcaaatcgcttctccggggtgccggatcggttttccggctcgggatcgggcaccgacttcaccctgaaaatctccagggtcgaggccgaggacgtgggagcctactactgcatgcaaaacatccagttcccttccttcggcggcggcacaaagctggagattaag

SEQ ID NO: 150 - protein, 115 aa, Artificial Sequence
  Description of Artificial Sequence: Synthetic polypeptide
EVQLLESGGGLVQPGGSLRLSCAVSGFALSNHGMSWVRRAPGKGLEWVSGIVYSGSTYYAASVKGRFTISRDNSRNTLYLQMNSLRPEDTAIYYCSAHGGESDVWGQGTTVTVSS

SEQ ID NO: 151 - protein, 111 aa, Artificial Sequence
  Description of Artificial Sequence: Synthetic polypeptide
DIVMTQTPLSLSVTPGQPASISCKSSQSLLRNDGKTPLYWYLQKAGQPPQLLIYEVSNRFSGVPDRFSGSGSGTDFTLKISRVEAEDVGAYYCMQNIQFPSFGGGTKLEIK

SEQ ID NO: 152 - protein, 487 aa, Artificial Sequence
  Description of Artificial Sequence: Synthetic polypeptide
MALPVTALLLPLALLLHAARPEVQLLESGGGLVQPGGSLRLSCAVSGFALSNHGMSWVRRAPGKGLEWVSGIVYSGSTYYAASVKGRFTISRDNSRNTLYLQMNSLRPEDTAIYYCSAHGGESDVWGQGTTVTVSSASGGGGSGGRASGGGGSDIVMTQTPLSLSVTPGQPASISCKSSQSLLRNDGKTPLYWYLQKAGQPPQLLIYEVSNRFSGVPDRFSGSGSGTDFTLKISRVEAEDVGAYYCMQNIQFPSFGGGTKLEIKTTTPAPRPPTPAPTIASQPLSLRPEACRPAAGGAVHTRGLDFACDIYIWAPLAGTCGVLLLSLVITLYCKRGRKKLLYIFKQPFMRPVQTTQEEDGCSCRFPEEEEGGCELRVKFSRSADAPAYKQGQNQLYNELNLGRREEYDVLDKRRGRDPEMGGKPRRKNPQEGLYNELQKDKMAEAYSEIGMKGERRRGKGHDGLYQGLSTATKDTYDALHMQALPPR

SEQ ID NO: 153 - DNA, 1461 bp, Artificial Sequence
  Description of Artificial Sequence: Synthetic polynucleotide
atggccctccctgtcaccgccctgctgcttccgctggctcttctgctccacgccgctcggcccgaagtgcaattgttggaatctggaggaggacttgtgcagcctggaggatcactgagactttcgtgtgcggtgtcaggcttcgccctgagcaaccacggcatgagctgggtgcggagagccccggggaagggtctggaatgggtgtccgggatcgtctactccggttcaacttactacgccgcaagcgtgaagggtcgcttcaccatttcccgcgataactcccggaacaccctgtacctccaaatgaactccctgcggcccgaggacaccgccatctactactgttccgcgcatggaggagagtccgatgtctggggacagggcactaccgtgaccgtgtcgagcgcctcggggggaggaggctccggcggtcgcgcctccggggggggtggcagcgacattgtgatgacgcagactccactctcgctgtccgtgaccccgggacagcccgcgtccatctcgtgcaagagctcccagagcctgctgaggaacgacggaaagactcctctgtattggtacctccagaaggctggacagcccccgcaactgctcatctacgaagtgtcaaatcgcttctccggggtgccggatcggttttccggctcgggatcgggcaccgacttcaccctgaaaatctccagggtcgaggccgaggacgtgggagcctactactgcatgcaaaacatccagttcccttccttcggcggcggcacaaagctggagattaagaccactaccccagcaccgaggccacccaccccggctcctaccatcgcctcccagcctctgtccctgcgtccggaggcatgtagacccgcagctggtggggccgtgcatacccggggtcttgacttcgcctgcgatatctacatttgggcccctctggctggtacttgcggggtcctgctgctttcactcgtgatcactctttactgtaagcgcggtcggaagaagctgctgtacatctttaagcaacccttcatgaggcctgtgcagactactcaagaggaggacggctgttcatgccggttcccagaggaggaggaaggcggctgcgaactgcgcgtgaaattcagccgcagcgcagatgctccagcctacaagcaggggcagaaccagctctacaacgaactcaatcttggtcggagagaggagtacgacgtgctggacaagcggagaggacgggacccagaaatgggcgggaagccgcgcagaaagaatccccaagagggcctgtacaacgagctccaaaaggataagatggcagaagcctatagcgagattggtatgaaaggggaacgcagaagaggcaaaggccacgacggactgtaccagggactcagcaccgccaccaaggacacctatgacgctcttcacatgcaggccctgccgcctcgg

SEQ ID NO: 154 - protein, 249 aa, Artificial Sequence
  Description of Artificial Sequence: Synthetic polypeptide
QVQLVQSGAEVRKTGASVKVSCKASGYIFDNFGINWVRQAPGQGLEWMGWINPKNNNTNYAQKFQGRVTITADESTNTAYMEVSSLRSEDTAVYYCARGPYYYQSYMDVWGQGTMVTVSSASGGGGSGGRASGGGGSDIVMTQTPLSLPVTPGEPASISCRSSQSLLHSNGYNYLNWYLQKPGQSPQLLIYLGSKRASGVPDRFSGSGSGTDFTLHITRVGAEDVGVYYCMQALQTPYTFGQGTKLEIK

SEQ ID NO: 155 - DNA, 747 bp, Artificial Sequence
  Description of Artificial Sequence: Synthetic polynucleotide
caagtccaactcgtccagtccggcgcagaagtcagaaaaaccggtgctagcgtgaaagtgtcctgcaaggcctccggctacattttcgataacttcggaatcaactgggtcagacaggccccgggccaggggctggaatggatgggatggatcaaccccaagaacaacaacaccaactacgcacagaagttccagggccgcgtgactatcaccgccgatgaatcgaccaataccgcctacatggaggtgtcctccctgcggtcggaggacactgccgtgtattactgcgcgaggggcccatactactaccaaagctacatggacgtctggggacagggaaccatggtgaccgtgtcatccgcctccggtggtggaggctccggggggcgggcttcaggaggcggaggaagcgatattgtgatgacccagactccgcttagcctgcccgtgactcctggagaaccggcctccatttcctgccggtcctcgcaatcactcctgcattccaacggttacaactacctgaattggtacctccagaagcctggccagtcgccccagttgctgatctatctgggctcgaagcgcgcctccggggtgcctgaccggtttagcggatctgggagcggcacggacttcactctccacatcacccgcgtgggagcggaggacgtgggagtgtactactgtatgcaggcgctgcagactccgtacacattcggacagggcaccaagctggagatcaag

SEQ ID NO: 156 - protein, 120 aa, Artificial Sequence
  Description of Artificial Sequence: Synthetic polypeptide
QVQLVQSGAEVRKTGASVKVSCKASGYIFDNFGINWVRQAPGQGLEWMGWINPKNNNTNYAQKFQGRVTITADESTNTAYMEVSSLRSEDTAVYYCARGPYYYQSYMDVWGQGTMVTVSS

SEQ ID NO: 157 - protein, 112 aa, Artificial Sequence
  Description of Artificial Sequence: Synthetic polypeptide
DIVMTQTPLSLPVTPGEPASISCRSSQSLLHSNGYNYLNWYLQKPGQSPQLLIYLGSKRASGVPDRFSGSGSGTDFTLHITRVGAEDVGVYYCMQALQTPYTFGQGTKLEIK

SEQ ID NO: 158 - protein, 493 aa, Artificial Sequence
  Description of Artificial Sequence: Synthetic polypeptide
MALPVTALLLPLALLLHAARPQVQLVQSGAEVRKTGASVKVSCKASGYIFDNFGINWVRQAPGQGLEWMGWINPKNNNTNYAQKFQGRVTITADESTNTAYMEVSSLRSEDTAVYYCARGPYYYQSYMDVWGQGTMVTVSSASGGGGSGGRASGGGGSDIVMTQTPLSLPVTPGEPASISCRSSQSLLHSNGYNYLNWYLQKPGQSPQLLIYLGSKRASGVPDRFSGSGSGTDFTLHITRVGAEDVGVYYCMQALQTPYTFGQGTKLEIKTTTPAPRPPTPAPTIASQPLSLRPEACRPAAGGAVHTRGLDFACDIYIWAPLAGTCGVLLLSLVITLYCKRGRKKLLYIFKQPFMRPVQTTQEEDGCSCRFPEEEEGGCELRVKFSRSADAPAYKQGQNQLYNELNLGRREEYDVLDKRRGRDPEMGGKPRRKNPQEGLYNELQKDKMAEAYSEIGMKGERRRGKGHDGLYQGLSTATKDTYDALHMQALPPR

SEQ ID NO: 159 - DNA, 1479 bp, Artificial Sequence
  Description of Artificial Sequence: Synthetic polynucleotide
atggccctccctgtcaccgccctgctgcttccgctggctcttctgctccacgccgctcggccccaagtccaactcgtccagtccggcgcagaagtcagaaaaaccggtgctagcgtgaaagtgtcctgcaaggcctccggctacattttcgataacttcggaatcaactgggtcagacaggccccgggccaggggctggaatggatgggatggatcaaccccaagaacaacaacaccaactacgcacagaagttccagggccgcgtgactatcaccgccgatgaatcgaccaataccgcctacatggaggtgtcctccctgcggtcggaggacactgccgtgtattactgcgcgaggggcccatactactaccaaagctacatggacgtctggggacagggaaccatggtgaccgtgtcatccgcctccggtggtggaggctccggggggcgggcttcaggaggcggaggaagcgatattgtgatgacccagactccgcttagcctgcccgtgactcctggagaaccggcctccatttcctgccggtcctcgcaatcactcctgcattccaacggttacaactacctgaattggtacctccagaagcctggccagtcgccccagttgctgatctatctgggctcgaagcgcgcctccggggtgcctgaccggtttagcggatctgggagcggcacggacttcactctccacatcacccgcgtgggagcggaggacgtgggagtgtactactgtatgcaggcgctgcagactccgtacacattcggacagggcaccaagctggagatcaagaccactaccccagcaccgaggccacccaccccggctcctaccatcgcctcccagcctctgtccctgcgtccggaggcatgtagacccgcagctggtggggccgtgcatacccggggtcttgacttcgcctgcgatatctacatttgggcccctctggctggtacttgcggggtcctgctgctttcactcgtgatcactctttactgtaagcgcggtcggaagaagctgctgtacatctttaagcaacccttcatgaggcctgtgcagactactcaagaggaggacggctgttcatgccggttcccagaggaggaggaaggcggctgcgaactgcgcgtgaaattcagccgcagcgcagatgctccagcctacaagcaggggcagaaccagctctacaacgaactcaatcttggtcggagagaggagtacgacgtgctggacaagcggagaggacgggacccagaaatgggcgggaagccgcgcagaaagaatccccaagagggcctgtacaacgagctccaaaaggataagatggcagaagcctatagcgagattggtatgaaaggggaacgcagaagaggcaaaggccacgacggactgtaccagggactcagcaccgccaccaaggacacctatgacgctcttcacatgcaggccctgccgcctcgg

SEQ ID NO: 160 - protein, 246 aa, Artificial Sequence
  Description of Artificial Sequence: Synthetic polypeptide
QVQLQESGGGLVQPGGSLRLSCAASGFTFSSDAMTWVRQAPGKGLEWVSVISGSGGTTYYADSVKGRFTISRDNSKNTLYLQMNSLRAEDTAVYYCAKLDSSGYYYARGPRYWGQGTLVTVSSASGGGGSGGRASGGGGSDIQLTQSPSSLSASVGDRVTITCRASQSISSYLNWYQQKPGKAPKLLIYGASTLASGVPARFSGSGSGTHFTLTINSLQSEDSATYYCQQSYKRASFGQGTKVEIK

SEQ ID NO: 161 - DNA, 738 bp, Artificial Sequence
  Description of Artificial Sequence: Synthetic polynucleotide
caagtgcaacttcaagaatcaggcggaggactcgtgcagcccggaggatcattgcggctctcgtgcgccgcctcgggcttcaccttctcgagcgacgccatgacctgggtccgccaggccccggggaaggggctggaatgggtgtctgtgatttccggctccgggggaactacgtactacgccgattccgtgaaaggtcgcttcactatctcccgggacaacagcaagaacaccctttatctgcaaatgaattccctccgcgccgaggacaccgccgtgtactactgcgccaagctggactcctcgggctactactatgcccggggtccgagatactggggacagggaaccctcgtgaccgtgtcctccgcgtccggcggaggagggtcgggagggcgggcctccggcggcggcggttcggacatccagctgacccagtccccatcctcactgagcgcaagcgtgggcgacagagtcaccattacatgcagggcgtcccagagcatcagctcctacctgaactggtaccaacagaagcctggaaaggctcctaagctgttgatctacggggcttcgaccctggcatccggggtgcccgcgaggtttagcggaagcggtagcggcactcacttcactctgaccattaacagcctccagtccgaggattcagccacttactactgtcagcagtcctacaagcgggccagcttcggacagggcactaaggtcgagatcaag

SEQ ID NO: 162 - protein, 123 aa, Artificial Sequence
  Description of Artificial Sequence: Synthetic polypeptide
QVQLQESGGGLVQPGGSLRLSCAASGFTFSSDAMTWVRQAPGKGLEWVSVISGSGGTTYYADSVKGRFTISRDNSKNTLYLQMNSLRAEDTAVYYCAKLDSSGYYYARGPRYWGQGTLVTVSS

SEQ ID NO: 163 - protein, 106 aa, Artificial Sequence
  Description of Artificial Sequence: Synthetic polypeptide
DIQLTQSPSSLSASVGDRVTITCRASQSISSYLNWYQQKPGKAPKLLIYGASTLASGVPARFSGSGSGTHFTLTINSLQSEDSATYYCQQSYKRASFGQGTKVEIK

SEQ ID NO: 164 - protein, 490 aa, Artificial Sequence
  Description of Artificial Sequence: Synthetic polypeptide
MALPVTALLLPLALLLHAARPQVQLQESGGGLVQPGGSLRLSCAASGFTFSSDAMTWVRQAPGKGLEWVSVISGSGGTTYYADSVKGRFTISRDNSKNTLYLQMNSLRAEDTAVYYCAKLDSSGYYYARGPRYWGQGTLVTVSSASGGGGSGGRASGGGGSDIQLTQSPSSLSASVGDRVTITCRASQSISSYLNWYQQKPGKAPKLLIYGASTLASGVPARFSGSGSGTHFTLTINSLQSEDSATYYCQQSYKRASFGQGTKVEIKTTTPAPRPPTPAPTIASQPLSLRPEACRPAAGGAVHTRGLDFACDIYIWAPLAGTCGVLLLSLVITLYCKRGRKKLLYIFKQPFMRPVQTTQEEDGCSCRFPEEEEGGCELRVKFSRSADAPAYKQGQNQLYNELNLGRREEYDVLDKRRGRDPEMGGKPRRKNPQEGLYNELQKDKMAEAYSEIGMKGERRRGKGHDGLYQGLSTATKDTYDALHMQALPPR

SEQ ID NO: 165 - DNA, 1470 bp, Artificial Sequence
  Description of Artificial Sequence: Synthetic polynucleotide
atggccctccctgtcaccgccctgctgcttccgctggctcttctgctccacgccgctcggccccaagtgcaacttcaagaatcaggcggaggactcgtgcagcccggaggatcattgcggctctcgtgcgccgcctcgggcttcaccttctcgagcgacgccatgacctgggtccgccaggccccggggaaggggctggaatgggtgtctgtgatttccggctccgggggaactacgtactacgccgattccgtgaaaggtcgcttcactatctcccgggacaacagcaagaacaccctttatctgcaaatgaattccctccgcgccgaggacaccgccgtgtactactgcgccaagctggactcctcgggctactactatgcccggggtccgagatactggggacagggaaccctcgtgaccgtgtcctccgcgtccggcggaggagggtcgggagggcgggcctccggcggcggcggttcggacatccagctgacccagtccccatcctcactgagcgcaagcgtgggcgacagagtcaccattacatgcagggcgtcccagagcatcagctcctacctgaactggtaccaacagaagcctggaaaggctcctaagctgttgatctacggggcttcgaccctggcatccggggtgcccgcgaggtttagcggaagcggtagcggcactcacttcactctgaccattaacagcctccagtccgaggattcagccacttactactgtcagcagtcctacaagcgggccagcttcggacagggcactaaggtcgagatcaagaccactaccccagcaccgaggccacccaccccggctcctaccatcgcctcccagcctctgtccctgcgtccggaggcatgtagacccgcagctggtggggccgtgcatacccggggtcttgacttcgcctgcgatatctacatttgggcccctctggctggtacttgcggggtcctgctgctttcactcgtgatcactctttactgtaagcgcggtcggaagaagctgctgtacatctttaagcaacccttcatgaggcctgtgcagactactcaagaggaggacggctgttcatgccggttcccagaggaggaggaaggcggctgcgaactgcgcgtgaaattcagccgcagcgcagatgctccagcctacaagcaggggcagaaccagctctacaacgaactcaatcttggtcggagagaggagtacgacgtgctggacaagcggagaggacgggacccagaaatgggcgggaagccgcgcagaaagaatccccaagagggcctgtacaacgagctccaaaaggataagatggcagaagcctatagcgagattggtatgaaaggggaacgcagaagaggcaaaggccacgacggactgtaccagggactcagcaccgccaccaaggacacctatgacgctcttcacatgcaggccctgccgcctcgg

SEQ ID NO: 166 - protein, 247 aa, Artificial Sequence
  Description of Artificial Sequence: Synthetic polypeptide
QVQLVQSGAEVKKPGASVKVSCKASGYTFSNYGITWVRQAPGQGLEWMGWISAYNGNTNYAQKFQGRVTMTRNTSISTAYMELSSLRSEDTAVYYCARGPYYYYMDVWGKGTMVTVSSASGGGGSGGRASGGGGSEIVMTQSPLSLPVTPGEPASISCRSSQSLLYSNGYNYVDWYLQKPGQSPQLLIYLGSNRASGVPDRFSGSGSGTDFKLQISRVEAEDVGIYYCMQGRQFPYSFGQGTKVEIK

SEQ ID NO: 167 - DNA, 741 bp, Artificial Sequence
  Description of Artificial Sequence: Synthetic polynucleotide
caagtccaactggtccagagcggtgcagaagtgaagaagcccggagcgagcgtgaaagtgtcctgcaaggcttccgggtacaccttctccaactacggcatcacttgggtgcgccaggccccgggacagggcctggaatggatggggtggatttccgcgtacaacggcaatacgaactacgctcagaagttccagggtagagtgaccatgactaggaacacctccatttccaccgcctacatggaactgtcctccctgcggagcgaggacaccgccgtgtactattgcgcccggggaccatactactactacatggatgtctgggggaaggggactatggtcaccgtgtcatccgcctcgggaggcggcggatcaggaggacgcgcctctggtggtggaggatcggagatcgtgatgacccagagccctctctccttgcccgtgactcctggggagcccgcatccatttcatgccggagctcccagtcacttctctactccaacggctataactacgtggattggtacctccaaaagccgggccagagcccgcagctgctgatctacctgggctcgaacagggccagcggagtgcctgaccggttctccgggtcgggaagcgggaccgacttcaagctgcaaatctcgagagtggaggccgaggacgtgggaatctactactgtatgcagggccgccagtttccgtactcgttcggacagggcaccaaagtggaaatcaag

SEQ ID NO: 168 - protein, 118 aa, Artificial Sequence
  Description of Artificial Sequence: Synthetic polypeptide
QVQLVQSGAEVKKPGASVKVSCKASGYTFSNYGITWVRQAPGQGLEWMGWISAYNGNTNYAQKFQGRVTMTRNTSISTAYMELSSLRSEDTAVYYCARGPYYYYMDVWGKGTMVTVSS

SEQ ID NO: 169 - protein, 112 aa, Artificial Sequence
  Description of Artificial Sequence: Synthetic polypeptide
EIVMTQSPLSLPVTPGEPASISCRSSQSLLYSNGYNYVDWYLQKPGQSPQLLIYLGSNRASGVPDRFSGSGSGTDFKLQISRVEAEDVGIYYCMQGRQFPYSFGQGTKVEIK

SEQ ID NO: 170 - protein, 491 aa, Artificial Sequence
  Description of Artificial Sequence: Synthetic polypeptide
MALPVTALLLPLALLLHAARPQVQLVQSGAEVKKPGASVKVSCKASGYTFSNYGITWVRQAPGQGLEWMGWISAYNGNTNYAQKFQGRVTMTRNTSISTAYMELSSLRSEDTAVYYCARGPYYYYMDVWGKGTMVTVSSASGGGGSGGRASGGGGSEIVMTQSPLSLPVTPGEPASISCRSSQSLLYSNGYNYVDWYLQKPGQSPQLLIYLGSNRASGVPDRFSGSGSGTDFKLQISRVEAEDVGIYYCMQGRQFPYSFGQGTKVEIKTTTPAPRPPTPAPTIASQPLSLRPEACRPAAGGAVHTRGLDFACDIYIWAPLAGTCGVLLLSLVITLYCKRGRKKLLYIFKQPFMRPVQTTQEEDGCSCRFPEEEEGGCELRVKFSRSADAPAYKQGQNQLYNELNLGRREEYDVLDKRRGRDPEMGGKPRRKNPQEGLYNELQKDKMAEAYSEIGMKGERRRGKGHDGLYQGLSTATKDTYDALHMQALPPR

SEQ ID NO: 171 - DNA, 1473 bp, Artificial Sequence
  Description of Artificial Sequence: Synthetic polynucleotide
atggccctccctgtcaccgccctgctgcttccgctggctcttctgctccacgccgctcggccccaagtccaactggtccagagcggtgcagaagtgaagaagcccggagcgagcgtgaaagtgtcctgcaaggcttccgggtacaccttctccaactacggcatcacttgggtgcgccaggccccgggacagggcctggaatggatggggtggatttccgcgtacaacggcaatacgaactacgctcagaagttccagggtagagtgaccatgactaggaacacctccatttccaccgcctacatggaactgtcctccctgcggagcgaggacaccgccgtgtactattgcgcccggggaccatactactactacatggatgtctgggggaaggggactatggtcaccgtgtcatccgcctcgggaggcggcggatcaggaggacgcgcctctggtggtggaggatcggagatcgtgatgacccagagccctctctccttgcccgtgactcctggggagcccgcatccatttcatgccggagctcccagtcacttctctactccaacggctataactacgtggattggtacctccaaaagccgggccagagcccgcagctgctgatctacctgggctcgaacagggccagcggagtgcctgaccggttctccgggtcgggaagcgggaccgacttcaagctgcaaatctcgagagtggaggccgaggacgtgggaatctactactgtatgcagggccgccagtttccgtactcgttcggacagggcaccaaagtggaaatcaagaccactaccccagcaccgaggccacccaccccggctcctaccatcgcctcccagcctctgtccctgcgtccggaggcatgtagacccgcagctggtggggccgtgcatacccggggtcttgacttcgcctgcgatatctacatttgggcccctctggctggtacttgcggggtcctgctgctttcactcgtgatcactctttactgtaagcgcggtcggaagaagctgctgtacatctttaagcaacccttcatgaggcctgtgcagactactcaagaggaggacggctgttcatgccggttcccagaggaggaggaaggcggctgcgaactgcgcgtgaaattcagccgcagcgcagatgctccagcctacaagcaggggcagaaccagctctacaacgaactcaatcttggtcggagagaggagtacgacgtgctggacaagcggagaggacgggacccagaaatgggcgggaagccgcgcagaaagaatccccaagagggcctgtacaacgagctccaaaaggataagatggcagaagcctatagcgagattggtatgaaaggggaacgcagaagaggcaaaggccacgacggactgtaccagggactcagcaccgccaccaaggacacctatgacgctcttcacatgcaggccctgccgcctcgg

SEQ ID NO: 172 - protein, 238 aa, Artificial Sequence
  Description of Artificial Sequence: Synthetic polypeptide
EVQLLETGGGLVQPGGSLRLSCAVSGFALSNHGMSWVRRAPGKGLEWVSGIVYSGSTYYAASVKGRFTISRDNSRNTLYLQMNSLRPEDTAIYYCSAHGGESDVWGQGTTVTVSSASGGGGSGGRASGGGGSEIVLTQSPATLSVSPGESATLSCRASQSVSSNLAWYQQKPGQAPRLLIYGASTRASGIPDRFSGSGSGTDFTLTISSLQAEDVAVYYCQQYGSSLTFGGGTKVEIK

SEQ ID NO: 173 - DNA, 714 bp, Artificial Sequence
  Description of Artificial Sequence: Synthetic polynucleotide
gaagtgcaattgctcgaaactggaggaggtctggtgcaacctggaggatcacttcgcctgtcctgcgccgtgtcgggctttgccctgtccaaccatggaatgagctgggtccgccgcgcgccggggaagggcctcgaatgggtgtccggcatcgtctactccggctccacctactacgccgcgtccgtgaagggccggttcacgatttcacgggacaactcgcggaacaccctgtacctccaaatgaattcccttcggccggaggatactgccatctactactgctccgcccacggtggcgaatccgacgtctggggccagggaaccaccgtgaccgtgtccagcgcgtccgggggaggaggaagcgggggtagagcatcgggtggaggcggatcagagatcgtgctgacccagtcccccgccaccttgagcgtgtcaccaggagagtccgccaccctgtcatgccgcgccagccagtccgtgtcctccaacctggcttggtaccagcagaagccggggcaggcccctagactcctgatctatggggcgtcgacccgggcatctggaattcccgataggttcagcggatcgggctcgggcactgacttcactctgaccatctcctcgctgcaagccgaggacgtggctgtgtactactgtcagcagtacggaagctccctgactttcggtggcgggaccaaagtcgagattaag

SEQ ID NO: 174 - protein, 115 aa, Artificial Sequence
  Description of Artificial Sequence: Synthetic polypeptide
EVQLLETGGGLVQPGGSLRLSCAVSGFALSNHGMSWVRRAPGKGLEWVSGIVYSGSTYYAASVKGRFTISRDNSRNTLYLQMNSLRPEDTAIYYCSAHGGESDVWGQGTTVTVSS

SEQ ID NO: 175 - protein, 106 aa, Artificial Sequence
  Description of Artificial Sequence: Synthetic polypeptide
EIVLTQSPATLSVSPGESATLSCRASQSVSSNLAWYQQKPGQAPRLLIYGASTRASGIPDRFSGSGSGTDFTLTISSLQAEDVAVYYCQQYGSSLTFGGGTKVEIK

SEQ ID NO: 176 - protein, 482 aa, Artificial Sequence
  Description of Artificial Sequence: Synthetic polypeptide
MALPVTALLLPLALLLHAARPEVQLLETGGGLVQPGGSLRLSCAVSGFALSNHGMSWVRRAPGKGLEWVSGIVYSGSTYYAASVKGRFTISRDNSRNTLYLQMNSLRPEDTAIYYCSAHGGESDVWGQGTTVTVSSASGGGGSGGRASGGGGSEIVLTQSPATLSVSPGESATLSCRASQSVSSNLAWYQQKPGQAPRLLIYGASTRASGIPDRFSGSGSGTDFTLTISSLQAEDVAVYYCQQYGSSLTFGGGTKVEIKTTTPAPRPPTPAPTIASQPLSLRPEACRPAAGGAVHTRGLDFACDIYIWAPLAGTCGVLLLSLVITLYCKRGRKKLLYIFKQPFMRPVQTTQEEDGCSCRFPEEEEGGCELRVKFSRSADAPAYKQGQNQLYNELNLGRREEYDVLDKRRGRDPEMGGKPRRKNPQEGLYNELQKDKMAEAYSEIGMKGERRRGKGHDGLYQGLSTATKDTYDALHMQALPPR

SEQ ID NO: 177 - DNA, 1446 bp, Artificial Sequence
  Description of Artificial Sequence: Synthetic polynucleotide
atggccctccctgtcaccgccctgctgcttccgctggctcttctgctccacgccgctcggcccgaagtgcaattgctcgaaactggaggaggtctggtgcaacctggaggatcacttcgcctgtcctgcgccgtgtcgggctttgccctgtccaaccatggaatgagctgggtccgccgcgcgccggggaagggcctcgaatgggtgtccggcatcgtctactccggctccacctactacgccgcgtccgtgaagggccggttcacgatttcacgggacaactcgcggaacaccctgtacctccaaatgaattcccttcggccggaggatactgccatctactactgctccgcccacggtggcgaatccgacgtctggggccagggaaccaccgtgaccgtgtccagcgcgtccgggggaggaggaagcgggggtagagcatcgggtggaggcggatcagagatcgtgctgacccagtcccccgccaccttgagcgtgtcaccaggagagtccgccaccctgtcatgccgcgccagccagtccgtgtcctccaacctggcttggtaccagcagaagccggggcaggcccctagactcctgatctatggggcgtcgacccgggcatctggaattcccgataggttcagcggatcgggctcgggcactgacttcactctgaccatctcctcgctgcaagccgaggacgtggctgtgtactactgtcagcagtacggaagctccctgactttcggtggcgggaccaaagtcgagattaagaccactaccccagcaccgaggccacccaccccggctcctaccatcgcctcccagcctctgtccctgcgtccggaggcatgtagacccgcagctggtggggccgtgcatacccggggtcttgacttcgcctgcgatatctacatttgggcccctctggctggtacttgcggggtcctgctgctttcactcgtgatcactctttactgtaagcgcggtcggaagaagctgctgtacatctttaagcaacccttcatgaggcctgtgcagactactcaagaggaggacggctgttcatgccggttcccagaggaggaggaaggcggctgcgaactgcgcgtgaaattcagccgcagcgcagatgctccagcctacaagcaggggcagaaccagctctacaacgaactcaatcttggtcggagagaggagtacgacgtgctggacaagcggagaggacgggacccagaaatgggcgggaagccgcgcagaaagaatccccaagagggcctgtacaacgagctccaaaaggataagatggcagaagcctatagcgagattggtatgaaaggggaacgcagaagaggcaaaggccacgacggactgtaccagggactcagcaccgccaccaaggacacctatgacgctcttcacatgcaggccctgccgcctcgg

SEQ ID NO: 178 - protein, 239 aa, Artificial Sequence
  Description of Artificial Sequence: Synthetic polypeptide
EVQLVETGGGLVQPGGSLRLSCAVSGFALSNHGMSWVRRAPGKGLEWVSGIVYSGSTYYAASVKGRFTISRDNSRNTLYLQMNSLRPEDTAIYYCSAHGGESDVWGQGTTVTVSSASGGGGSGGRASGGGGSEIVMTQSPATLSVSPGERATLSCRASQSVSSKLAWYQQKPGQAPRLLMYGASIRATGIPDRFSGSGSGTEFTLTISSLEPEDFAVYYCQQYGSSSWTFGQGTKVEIK

SEQ ID NO: 179 - DNA, 717 bp, Artificial Sequence
  Description of Artificial Sequence: Synthetic polynucleotide
gaagtgcaattggtggaaactggaggaggacttgtgcaacctggaggatcattgagactgagctgcgcagtgtcgggattcgccctgagcaaccatggaatgtcctgggtcagaagggcccctggaaaaggcctcgaatgggtgtcagggatcgtgtactccggttccacttactacgccgcctccgtgaaggggcgcttcactatctcacgggataactcccgcaataccctgtacctccaaatgaacagcctgcggccggaggataccgccatctactactgttccgcccacggtggagagtctgacgtctggggccagggaactaccgtgaccgtgtcctccgcgtccggcggtggagggagcggcggccgcgccagcggcggcggaggctccgagatcgtgatgacccagagccccgctactctgtcggtgtcgcccggagaaagggcgaccctgtcctgccgggcgtcgcagtccgtgagcagcaagctggcttggtaccagcagaagccgggccaggcaccacgcctgcttatgtacggtgcctccattcgggccaccggaatcccggaccggttctcggggtcggggtccggtaccgagttcacactgaccatttcctcgctcgagcccgaggactttgccgtctattactgccagcagtacggctcctcctcatggacgttcggccaggggaccaaggtcgaaatcaag

SEQ ID NO: 180 - protein, 115 aa, Artificial Sequence
  Description of Artificial Sequence: Synthetic polypeptide
EVQLVETGGGLVQPGGSLRLSCAVSGFALSNHGMSWVRRAPGKGLEWVSGIVYSGSTYYAASVKGRFTISRDNSRNTLYLQMNSLRPEDTAIYYCSAHGGESDVWGQGTTVTVSS

SEQ ID NO: 181 - protein, 107 aa, Artificial Sequence
  Description of Artificial Sequence: Synthetic polypeptide
EIVMTQSPATLSVSPGERATLSCRASQSVSSKLAWYQQKPGQAPRLLMYGASIRATGIPDRFSGSGSGTEFTLTISSLEPEDFAVYYCQQYGSSSWTFGQGTKVEIK

SEQ ID NO: 182 - protein, 483 aa, Artificial Sequence
  Description of Artificial Sequence: Synthetic polypeptide
MALPVTALLLPLALLLHAARPEVQLVETGGGLVQPGGSLRLSCAVSGFALSNHGMSWVRRAPGKGLEWVSGIVYSGSTYYAASVKGRFTISRDNSRNTLYLQMNSLRPEDTAIYYCSAHGGESDVWGQGTTVTVSSASGGGGSGGRASGGGGSEIVMTQSPATLSVSPGERATLSCRASQSVSSKLAWYQQKPGQAPRLLMYGASIRATGIPDRFSGSGSGTEFTLTISSLEPEDFAVYYCQQYGSSSWTFGQGTKVEIKTTTPAPRPPTPAPTIASQPLSLRPEACRPAAGGAVHTRGLDFACDIYIWAPLAGTCGVLLLSLVITLYCKRGRKKLLYIFKQPFMRPVQTTQEEDGCSCRFPEEEEGGCELRVKFSRSADAPAYKQGQNQLYNELNLGRREEYDVLDKRRGRDPEMGGKPRRKNPQEGLYNELQKDKMAEAYSEIGMKGERRRGKGHDGLYQGLSTATKDTYDALHMQALPPR

SEQ ID NO: 183 - DNA, 1449 bp, Artificial Sequence
  Description of Artificial Sequence: Synthetic polynucleotide
atggccctccctgtcaccgccctgctgcttccgctggctcttctgctccacgccgctcggcccgaagtgcaattggtggaaactggaggaggacttgtgcaacctggaggatcattgagactgagctgcgcagtgtcgggattcgccctgagcaaccatggaatgtcctgggtcagaagggcccctggaaaaggcctcgaatgggtgtcagggatcgtgtactccggttccacttactacgccgcctccgtgaaggggcgcttcactatctcacgggataactcccgcaataccctgtacctccaaatgaacagcctgcggccggaggataccgccatctactactgttccgcccacggtggagagtctgacgtctggggccagggaactaccgtgaccgtgtcctccgcgtccggcggtggagggagcggcggccgcgccagcggcggcggaggctccgagatcgtgatgacccagagccccgctactctgtcggtgtcgcccggagaaagggcgaccctgtcctgccgggcgtcgcagtccgtgagcagcaagctggcttggtaccagcagaagccgggccaggcaccacgcctgcttatgtacggtgcctccattcgggccaccggaatcccggaccggttctcggggtcggggtccggtaccgagttcacactgaccatttcctcgctcgagcccgaggactttgccgtctattactgccagcagtacggctcctcctcatggacgttcggccaggggaccaaggtcgaaatcaagaccactaccccagcaccgaggccacccaccccggctcctaccatcgcctcccagcctctgtccctgcgtccggaggcatgtagacccgcagctggtggggccgtgcatacccggggtcttgacttcgcctgcgatatctacatttgggcccctctggctggtacttgcggggtcctgctgctttcactcgtgatcactctttactgtaagcgcggtcggaagaagctgctgtacatctttaagcaacccttcatgaggcctgtgcagactactcaagaggaggacggctgttcatgccggttcccagaggaggaggaaggcggctgcgaactgcgcgtgaaattcagccgcagcgcagatgctccagcctacaagcaggggcagaaccagctctacaacgaactcaatcttggtcggagagaggagtacgacgtgctggacaagcggagaggacgggacccagaaatgggcgggaagccgcgcagaaagaatccccaagagggcctgtacaacgagctccaaaaggataagatggcagaagcctatagcgagattggtatgaaaggggaacgcagaagaggcaaaggccacgacggactgtaccagggactcagcaccgccaccaaggacacctatgacgctcttcacatgcaggccctgccgcctcgg

SEQ ID NO: 184 - protein, 241 aa, Artificial Sequence
  Description of Artificial Sequence: Synthetic polypeptide
EVQLVETGGGVVQPGGSLRLSCAVSGFALSNHGMSWVRRAPGKGLEWVSGIVYSGSTYYAASVKGRFTISRDNSRNTLYLQMNSLRPEDTAIYYCSAHGGESDVWGQGTTVTVSSASGGGGSGGRASGGGGSEIVLTQSPGTLSLSPGERATLSCRASQSVGSTNLAWYQQKPGQAPRLLIYDASNRATGIPDRFSGGGSGTDFTLTISRLEPEDFAVYYCQQYGSSPPWTFGQGTKVEIK

SEQ ID NO: 185 - DNA, 723 bp, Artificial Sequence
  Description of Artificial Sequence: Synthetic polynucleotide
gaagtgcaattggtggagactggaggaggagtggtgcaacctggaggaagcctgagactgtcatgcgcggtgtcgggcttcgccctctccaaccacggaatgtcctgggtccgccgggcccctgggaaaggacttgaatgggtgtccggcatcgtgtactcgggttccacctactacgcggcctcagtgaagggccggtttactattagccgcgacaactccagaaacacactgtacctccaaatgaactcgctgcggccggaagataccgctatctactactgctccgcccatgggggagagtcggacgtctggggacagggcaccactgtcactgtgtccagcgcttccggcggtggtggaagcgggggacgggcctcaggaggcggtggcagcgagattgtgctgacccagtcccccgggaccctgagcctgtccccgggagaaagggccaccctctcctgtcgggcatcccagtccgtggggtctactaaccttgcatggtaccagcagaagcccggccaggcccctcgcctgctgatctacgacgcgtccaatagagccaccggcatcccggatcgcttcagcggaggcggatcgggcaccgacttcaccctcaccatttcaaggctggaaccggaggacttcgccgtgtactactgccagcagtatggttcgtccccaccctggacgttcggccaggggactaaggtcgagatcaag

SEQ ID NO: 186 - protein, 115 aa, Artificial Sequence
  Description of Artificial Sequence: Synthetic polypeptide
EVQLVETGGGVVQPGGSLRLSCAVSGFALSNHGMSWVRRAPGKGLEWVSGIVYSGSTYYAASVKGRFTISRDNSRNTLYLQMNSLRPEDTAIYYCSAHGGESDVWGQGTTVTVSS

SEQ ID NO: 187 - protein, 109 aa, Artificial Sequence
  Description of Artificial Sequence: Synthetic polypeptide
EIVLTQSPGTLSLSPGERATLSCRASQSVGSTNLAWYQQKPGQAPRLLIYDASNRATGIPDRFSGGGSGTDFTLTISRLEPEDFAVYYCQQYGSSPPWTFGQGTKVEIK

SEQ ID NO: 188 - protein, 485 aa, Artificial Sequence
  Description of Artificial Sequence: Synthetic polypeptide
MALPVTALLLPLALLLHAARPEVQLVETGGGVVQPGGSLRLSCAVSGFALSNHGMSWVRRAPGKGLEWVSGIVYSGSTYYAASVKGRFTISRDNSRNTLYLQMNSLRPEDTAIYYCSAHGGESDVWGQGTTVTVSSASGGGGSGGRASGGGGSEIVLTQSPGTLSLSPGERATLSCRASQSVGSTNLAWYQQKPGQAPRLLIYDASNRATGIPDRFSGGGSGTDFTLTISRLEPEDFAVYYCQQYGSSPPWTFGQGTKVEIKTTTPAPRPPTPAPTIASQPLSLRPEACRPAAGGAVHTRGLDFACDIYIWAPLAGTCGVLLLSLVITLYCKRGRKKLLYIFKQPFMRPVQTTQEEDGCSCRFPEEEEGGCELRVKFSRSADAPAYKQGQNQLYNELNLGRREEYDVLDKRRGRDPEMGGKPRRKNPQEGLYNELQKDKMAEAYSEIGMKGERRRGKGHDGLYQGLSTATKDTYDALHMQALPPR

SEQ ID NO: 189 - DNA, 1455 bp, Artificial Sequence
  Description of Artificial Sequence: Synthetic polynucleotide
atggccctccctgtcaccgccctgctgcttccgctggctcttctgctccacgccgctcggcccgaagtgcaattggtggagactggaggaggagtggtgcaacctggaggaagcctgagactgtcatgcgcggtgtcgggcttcgccctctccaaccacggaatgtcctgggtccgccgggcccctgggaaaggacttgaatgggtgtccggcatcgtgtactcgggttccacctactacgcggcctcagtgaagggccggtttactattagccgcgacaactccagaaacacactgtacctccaaatgaactcgctgcggccggaagataccgctatctactactgctccgcccatgggggagagtcggacgtctggggacagggcaccactgtcactgtgtccagcgcttccggcggtggtggaagcgggggacgggcctcaggaggcggtggcagcgagattgtgctgacccagtcccccgggaccctgagcctgtccccgggagaaagggccaccctctcctgtcgggcatcccagtccgtggggtctactaaccttgcatggtaccagcagaagcccggccaggcccctcgcctgctgatctacgacgcgtccaatagagccaccggcatcccggatcgcttcagcggaggcggatcgggcaccgacttcaccctcaccatttcaaggctggaaccggaggacttcgccgtgtactactgccagcagtatggttcgtccccaccctggacgttcggccaggggactaaggtcgagatcaagaccactaccccagcaccgaggccacccaccccggctcctaccatcgcctcccagcctctgtccctgcgtccggaggcatgtagacccgcagctggtggggccgtgcatacccggggtcttgacttcgcctgcgatatctacatttgggcccctctggctggtacttgcggggtcctgctgctttcactcgtgatcactctttactgtaagcgcggtcggaagaagctgctgtacatctttaagcaacccttcatgaggcctgtgcagactactcaagaggaggacggctgttcatgccggttcccagaggaggaggaaggcggctgcgaactgcgcgtgaaattcagccgcagcgcagatgctccagcctacaagcaggggcagaaccagctctacaacgaactcaatcttggtcggagagaggagtacgacgtgctggacaagcggagaggacgggacccagaaatgggcgggaagccgcgcagaaagaatccccaagagggcctgtacaacgagctccaaaaggataagatggcagaagcctatagcgagattggtatgaaaggggaacgcagaagaggcaaaggccacgacggactgtaccagggactcagcaccgccaccaaggacacctatgacgctcttcacatgcaggccctgccgcctcgg

SEQ ID NO: 190 - protein, 239 aa, Artificial Sequence
  Description of Artificial Sequence: Synthetic polypeptide
QVQLVESGGGLVKPGGSLRLSCAASGFTFSDYYMSWIRQAPGKGLEWVSYISSSGSTIYYADSVKGRFTISRDNAKNSLYLQMNSLRAEDTAVYYCARESGDGMDVWGQGTTVTVSSASGGGGSGGRASGGGGSDIQMTQSPSSLSASVGDRVTITCRASQSISSYLNWYQQKPGKAPKLLIYAASSLQSGVPSRFSGSGSGTDFTLTISSLQPEDFATYYCQQSYTLAFGQGTKVDIK

SEQ ID NO: 191 - DNA, 717 bp, Artificial Sequence
  Description of Artificial Sequence: Synthetic polynucleotide
caagtgcaactcgtggaatctggtggaggactcgtgaaacctggaggatcattgagactgtcatgcgcggcctcgggattcacgttctccgattactacatgagctggattcgccaggctccggggaagggactggaatgggtgtcctacatttcctcatccggctccaccatctactacgcggactccgtgaaggggagattcaccattagccgcgataacgccaagaacagcctgtaccttcagatgaactccctgcgggctgaagatactgccgtctactactgcgcaagggagagcggagatgggatggacgtctggggacagggtaccactgtgaccgtgtcgtcggcctccggcggagggggttcgggtggaagggccagcggcggcggaggcagcgacatccagatgacccagtccccctcatcgctgtccgcctccgtgggcgaccgcgtcaccatcacatgccgggcctcacagtcgatctcctcctacctcaattggtatcagcagaagcccggaaaggcccctaagcttctgatctacgcagcgtcctccctgcaatccggggtcccatctcggttctccggctcgggcagcggtaccgacttcactctgaccatctcgagcctgcagccggaggacttcgccacttactactgtcagcaaagctacaccctcgcgtttggccagggcaccaaagtggacatcaag

SEQ ID NO: 192 - protein, 117 aa, Artificial Sequence
  Description of Artificial Sequence: Synthetic polypeptide
QVQLVESGGGLVKPGGSLRLSCAASGFTFSDYYMSWIRQAPGKGLEWVSYISSSGSTIYYADSVKGRFTISRDNAKNSLYLQMNSLRAEDTAVYYCARESGDGMDVWGQGTTVTVSS

SEQ ID NO: 193 - protein, 105 aa, Artificial Sequence
  Description of Artificial Sequence: Synthetic polypeptide
DIQMTQSPSSLSASVGDRVTITCRASQSISSYLNWYQQKPGKAPKLLIYAASSLQSGVPSRFSGSGSGTDFTLTISSLQPEDFATYYCQQSYTLAFGQGTKVDIK

SEQ ID NO: 194 - protein, 483 aa, Artificial Sequence
  Description of Artificial Sequence: Synthetic polypeptide
MALPVTALLLPLALLLHAARPQVQLVESGGGLVKPGGSLRLSCAASGFTFSDYYMSWIRQAPGKGLEWVSYISSSGSTIYYADSVKGRFTISRDNAKNSLYLQMNSLRAEDTAVYYCARESGDGMDVWGQGTTVTVSSASGGGGSGGRASGGGGSDIQMTQSPSSLSASVGDRVTITCRASQSISSYLNWYQQKPGKAPKLLIYAASSLQSGVPSRFSGSGSGTDFTLTISSLQPEDFATYYCQQSYTLAFGQGTKVDIKTTTPAPRPPTPAPTIASQPLSLRPEACRPAAGGAVHTRGLDFACDIYIWAPLAGTCGVLLLSLVITLYCKRGRKKLLYIFKQPFMRPVQTTQEEDGCSCRFPEEEEGGCELRVKFSRSADAPAYKQGQNQLYNELNLGRREEYDVLDKRRGRDPEMGGKPRRKNPQEGLYNELQKDKMAEAYSEIGMKGERRRGKGHDGLYQGLSTATKDTYDALHMQALPPR

SEQ ID NO: 195 - DNA, 1449 bp, Artificial Sequence
  Description of Artificial Sequence: Synthetic polynucleotide
atggccctccctgtcaccgccctgctgcttccgctggctcttctgctccacgccgctcggccccaagtgcaactcgtggaatctggtggaggactcgtgaaacctggaggatcattgagactgtcatgcgcggcctcgggattcacgttctccgattactacatgagctggattcgccaggctccggggaagggactggaatgggtgtcctacatttcctcatccggctccaccatctactacgcggactccgtgaaggggagattcaccattagccgcgataacgccaagaacagcctgtaccttcagatgaactccctgcgggctgaagatactgccgtctactactgcgcaagggagagcggagatgggatggacgtctggggacagggtaccactgtgaccgtgtcgtcggcctccggcggagggggttcgggtggaagggccagcggcggcggaggcagcgacatccagatgacccagtccccctcatcgctgtccgcctccgtgggcgaccgcgtcaccatcacatgccgggcctcacagtcgatctcctcctacctcaattggtatcagcagaagcccggaaaggcccctaagcttctgatctacgcagcgtcctccctgcaatccggggtcccatctcggttctccggctcgggcagcggtaccgacttcactctgaccatctcgagcctgcagccggaggacttcgccacttactactgtcagcaaagctacaccctcgcgtttggccagggcaccaaagtggacatcaagaccactaccccagcaccgaggccacccaccccggctcctaccatcgcctcccagcctctgtccctgcgtccggaggcatgtagacccgcagctggtggggccgtgcatacccggggtcttgacttcgcctgcgatatctacatttgggcccctctggctggtacttgcggggtcctgctgctttcactcgtgatcactctttactgtaagcgcggtcggaagaagctgctgtacatctttaagcaacccttcatgaggcctgtgcagactactcaagaggaggacggctgttcatgccggttcccagaggaggaggaaggcggctgcgaactgcgcgtgaaattcagccgcagcgcagatgctccagcctacaagcaggggcagaaccagctctacaacgaactcaatcttggtcggagagaggagtacgacgtgctggacaagcggagaggacgggacccagaaatgggcgggaagccgcgcagaaagaatccccaagagggcctgtacaacgagctccaaaaggataagatggcagaagcctatagcgagattggtatgaaaggggaacgcagaagaggcaaaggccacgacggactgtaccagggactcagcaccgccaccaaggacacctatgacgctcttcacatgcaggccctgccgcctcgg

SEQ ID NO: 196 - protein, 246 aa, Artificial Sequence
  Description of Artificial Sequence: Synthetic polypeptide
QVQLVQSGGGLVKPGGSLRLSCAASGFTFSDYYMSWIRQAPGKGLEWVSYISSSGNTIYYADSVKGRFTISRDNAKNSLYLQMNSLRAEDTAVYYCARSTMVREDYWGQGTLVTVSSASGGGGSGGRASGGGGSDIVLTQSPLSLPVTLGQPASISCKSSESLVHNSGKTYLNWFHQRPGQSPRRLIYEVSNRDSGVPDRFTGSGSGTDFTLKISRVEAEDVGVYYCMQGTHWPGTFGQGTKLEIK

SEQ ID NO: 197 - DNA, 738 bp, Artificial Sequence
  Description of Artificial Sequence: Synthetic polynucleotide
caagtgcaactggtgcaaagcggaggaggattggtcaaacccggaggaagcctgagactgtcatgcgcggcctctggattcaccttctccgattactacatgtcatggatcagacaggccccggggaagggcctcgaatgggtgtcctacatctcgtcctccgggaacaccatctactacgccgacagcgtgaagggccgctttaccatttcccgcgacaacgcaaagaactcgctgtaccttcagatgaattccctgcgggctgaagataccgcggtgtactattgcgcccggtccactatggtccgggaggactactggggacagggcacactcgtgaccgtgtccagcgcgagcgggggtggaggcagcggtggacgcgcctccggcggcggcggttcagacatcgtgctgactcagtcgcccctgtcgctgccggtcaccctgggccaaccggcctcaattagctgcaagtcctcggagagcctggtgcacaactcaggaaagacttacctgaactggttccatcagcggcctggacagtccccacggaggctcatctatgaagtgtccaacagggattcgggggtgcccgaccgcttcactggctccgggtccggcaccgacttcaccttgaaaatctccagagtggaagccgaggacgtgggcgtgtactactgtatgcagggtacccactggcctggaacctttggacaaggaactaagctcgagattaag

SEQ ID NO: 198 - protein, 117 aa, Artificial Sequence
  Description of Artificial Sequence: Synthetic polypeptide
QVQLVQSGGGLVKPGGSLRLSCAASGFTFSDYYMSWIRQAPGKGLEWVSYISSSGNTIYYADSVKGRFTISRDNAKNSLYLQMNSLRAEDTAVYYCARSTMVREDYWGQGTLVTVSS

SEQ ID NO: 199 - protein, 112 aa, Artificial Sequence
  Description of Artificial Sequence: Synthetic polypeptide
DIVLTQSPLSLPVTLGQPASISCKSSESLVHNSGKTYLNWFHQRPGQSPRRLIYEVSNRDSGVPDRFTGSGSGTDFTLKISRVEAEDVGVYYCMQGTHWPGTFGQGTKLEIK

SEQ ID NO: 200 - protein, 490 aa, Artificial Sequence
  Description of Artificial Sequence: Synthetic polypeptide
MALPVTALLLPLALLLHAARPQVQLVQSGGGLVKPGGSLRLSCAASGFTFSDYYMSWIRQAPGKGLEWVSYISSSGNTIYYADSVKGRFTISRDNAKNSLYLQMNSLRAEDTAVYYCARSTMVREDYWGQGTLVTVSSASGGGGSGGRASGGGGSDIVLTQSPLSLPVTLGQPASISCKSSESLVHNSGKTYLNWFHQRPGQSPRRLIYEVSNRDSGVPDRFTGSGSGTDFTLKISRVEAEDVGVYYCMQGTHWPGTFGQGTKLEIKTTTPAPRPPTPAPTIASQPLSLRPEACRPAAGGAVHTRGLDFACDIYIWAPLAGTCGVLLLSLVITLYCKRGRKKLLYIFKQPFMRPVQTTQEEDGCSCRFPEEEEGGCELRVKFSRSADAPAYKQGQNQLYNELNLGRREEYDVLDKRRGRDPEMGGKPRRKNPQEGLYNELQKDKMAEAYSEIGMKGERRRGKGHDGLYQGLSTATKDTYDALHMQALPPR

SEQ ID NO: 201 - DNA, 1470 bp, Artificial Sequence
  Description of Artificial Sequence: Synthetic polynucleotide
atggccctccctgtcaccgccctgctgcttccgctggctcttctgctccacgccgctcggccccaagtgcaactggtgcaaagcggaggaggattggtcaaacccggaggaagcctgagactgtcatgcgcggcctctggattcaccttctccgattactacatgtcatggatcagacaggccccggggaagggcctcgaatgggtgtcctacatctcgtcctccgggaacaccatctactacgccgacagcgtgaagggccgctttaccatttcccgcgacaacgcaaagaactcgctgtaccttcagatgaattccctgcgggctgaagataccgcggtgtactattgcgcccggtccactatggtccgggaggactactggggacagggcacactcgtgaccgtgtccagcgcgagcgggggtggaggcagcggtggacgcgcctccggcggcggcggttcagacatcgtgctgactcagtcgcccctgtcgctgccggtcaccctgggccaaccggcctcaattagctgcaagtcctcggagagcctggtgcacaactcaggaaagacttacctgaactggttccatcagcggcctggacagtccccacggaggctcatctatgaagtgtccaacagggattcgggggtgcccgaccgcttcactggctccgggtccggcaccgacttcaccttgaaaatctccagagtggaagccgaggacgtgggcgtgtactactgtatgcagggtacccactggcctggaacctttggacaaggaactaagctcgagattaagaccactaccccagcaccgaggccacccaccccggctcctaccatcgcctcccagcctctgtccctgcgtccggaggcatgtagacccgcagctggtggggccgtgcatacccggggtcttgacttcgcctgcgatatctacatttgggcccctctggctggtacttgcggggtcctgctgctttcactcgtgatcactctttactgtaagcgcggtcggaagaagctgctgtacatctttaagcaacccttcatgaggcctgtgcagactactcaagaggaggacggctgttcatgccggttcccagaggaggaggaaggcggctgcgaactgcgcgtgaaattcagccgcagcgcagatgctccagcctacaagcaggggcagaaccagctctacaacgaactcaatcttggtcggagagaggagtacgacgtgctggacaagcggagaggacgggacccagaaatgggcgggaagccgcgcagaaagaatccccaagagggcctgtacaacgagctccaaaaggataagatggcagaagcctatagcgagattggtatgaaaggggaacgcagaagaggcaaaggccacgacggactgtaccagggactcagcaccgccaccaaggacacctatgacgctcttcacatgcaggccctgccgcctcgg

SEQ ID NO: 202 - protein, 239 aa, Artificial Sequence
  Description of Artificial Sequence: Synthetic polypeptide
QVQLVESGGGLVQPGGSLRLSCAVSGFALSNHGMSWVRRAPGKGLEWVSGIVYSGSTYYAASVKGRFTISRDNSRNTLYLQMNSLRPEDTAIYYCSAHGGESDVWGQGTTVTVSSASGGGGSGGRASGGGGSDIRLTQSPSPLSASVGDRVTITCQASEDINKFLNWYHQTPGKAPKLLIYDASTLQTGVPSRFSGSGSGTDFTLTINSLQPEDIGTYYCQQYESLPLTFGGGTKVEIK

SEQ ID NO: 203 - DNA, 717 bp, Artificial Sequence
  Description of Artificial Sequence: Synthetic polynucleotide
caagtgcaactcgtggaatctggtggaggactcgtgcaacccggtggaagccttaggctgtcgtgcgccgtcagcgggtttgctctgagcaaccatggaatgtcctgggtccgccgggcaccgggaaaagggctggaatgggtgtccggcatcgtgtacagcgggtcaacctattacgccgcgtccgtgaagggcagattcactatctcaagagacaacagccggaacaccctgtacttgcaaatgaattccctgcgccccgaggacaccgccatctactactgctccgcccacggaggagagtcggacgtgtggggccagggaacgactgtgactgtgtccagcgcatcaggagggggtggttcgggcggccgggcctcggggggaggaggttccgacattcggctgacccagtccccgtccccactgtcggcctccgtcggcgaccgcgtgaccatcacttgtcaggcgtccgaggacattaacaagttcctgaactggtaccaccagacccctggaaaggcccccaagctgctgatctacgatgcctcgacccttcaaactggagtgcctagccggttctccgggtccggctccggcactgatttcactctgaccatcaactcattgcagccggaagatatcgggacctactattgccagcagtacgaatccctcccgctcacattcggcgggggaaccaaggtcgagattaag

SEQ ID NO: 204 - protein, 115 aa, Artificial Sequence
  Description of Artificial Sequence: Synthetic polypeptide
QVQLVESGGGLVQPGGSLRLSCAVSGFALSNHGMSWVRRAPGKGLEWVSGIVYSGSTYYAASVKGRFTISRDNSRNTLYLQMNSLRPEDTAIYYCSAHGGESDVWGQGTTVTVSS

SEQ ID NO: 205 - protein, 107 aa, Artificial Sequence
  Description of Artificial Sequence: Synthetic polypeptide
DIRLTQSPSPLSASVGDRVTITCQASEDINKFLNWYHQTPGKAPKLLIYDASTLQTGVPSRFSGSGSGTDFTLTINSLQPEDIGTYYCQQYESLPLTFGGGTKVEIK

SEQ ID NO: 206 - protein, 483 aa, Artificial Sequence
  Description of Artificial Sequence: Synthetic polypeptide
MALPVTALLLPLALLLHAARPQVQLVESGGGLVQPGGSLRLSCAVSGFALSNHGMSWVRRAPGKGLEWVSGIVYSGSTYYAASVKGRFTISRDNSRNTLYLQMNSLRPEDTAIYYCSAHGGESDVWGQGTTVTVSSASGGGGSGGRASGGGGSDIRLTQSPSPLSASVGDRVTITCQASEDINKFLNWYHQTPGKAPKLLIYDASTLQTGVPSRFSGSGSGTDFTLTINSLQPEDIGTYYCQQYESLPLTFGGGTKVEIKTTTPAPRPPTPAPTIASQPLSLRPEACRPAAGGAVHTRGLDFACDIYIWAPLAGTCGVLLLSLVITLYCKRGRKKLLYIFKQPFMRPVQTTQEEDGCSCRFPEEEEGGCELRVKFSRSADAPAYKQGQNQLYNELNLGRREEYDVLDKRRGRDPEMGGKPRRKNPQEGLYNELQKDKMAEAYSEIGMKGERRRGKGHDGLYQGLSTATKDTYDALHMQALPPR

SEQ ID NO: 207 - DNA, 1449 bp, Artificial Sequence
  Description of Artificial Sequence: Synthetic polynucleotide
atggccctccctgtcaccgccctgctgcttccgctggctcttctgctccacgccgctcggccccaagtgcaactcgtggaatctggtggaggactcgtgcaacccggtggaagccttaggctgtcgtgcgccgtcagcgggtttgctctgagcaaccatggaatgtcctgggtccgccgggcaccgggaaaagggctggaatgggtgtccggcatcgtgtacagcgggtcaacctattacgccgcgtccgtgaagggcagattcactatctcaagagacaacagccggaacaccctgtacttgcaaatgaattccctgcgccccgaggacaccgccatctactactgctccgcccacggaggagagtcggacgtgtggggccagggaacgactgtgactgtgtccagcgcatcaggagggggtggttcgggcggccgggcctcggggggaggaggttccgacattcggctgacccagtccccgtccccactgtcggcctccgtcggcgaccgcgtgaccatcacttgtcaggcgtccgaggacattaacaagttcctgaactggtaccaccagacccctggaaaggcccccaagctgctgatctacgatgcctcgacccttcaaactggagtgcctagccggttctccgggtccggctccggcactgatttcactctgaccatcaactcattgcagccggaagatatcgggacctactattgccagcagtacgaatccctcccgctcacattcggcgggggaaccaaggtcgagattaagaccactaccccagcaccgaggccacccaccccggctcctaccatcgcctcccagcctctgtccctgcgtccggaggcatgtagacccgcagctggtggggccgtgcatacccggggtcttgacttcgcctgcgatatctacatttgggcccctctggctggtacttgcggggtcctgctgctttcactcgtgatcactctttactgtaagcgcggtcggaagaagctgctgtacatctttaagcaacccttcatgaggcctgtgcagactactcaagaggaggacggctgttcatgccggttcccagaggaggaggaaggcggctgcgaactgcgcgtgaaattcagccgcagcgcagatgctccagcctacaagcaggggcagaaccagctctacaacgaactcaatcttggtcggagagaggagtacgacgtgctggacaagcggagaggacgggacccagaaatgggcgggaagccgcgcagaaagaatccccaagagggcctgtacaacgagctccaaaaggataagatggcagaagcctatagcgagattggtatgaaaggggaacgcagaagaggcaaaggccacgacggactgtaccagggactcagcaccgccaccaaggacacctatgacgctcttcacatgcaggccctgccgcctcgg

SEQ ID NO: 208 - protein, 240 aa, Artificial Sequence
  Description of Artificial Sequence: Synthetic polypeptide
EVQLVETGGGLVQPGGSLRLSCAVSGFALSNHGMSWVRRAPGKGLEWVSGIVYSGSTYYAASVKGRFTISRDNSRNTLYLQMNSLRPEDTAIYYCSAHGGESDVWGQGTTVTVSSASGGGGSGGRASGGGGSETTLTQSPATLSVSPGERATLSCRASQSVGSNLAWYQQKPGQGPRLLIYGASTRATGIPARFSGSGSGTEFTLTISSLQPEDFAVYYCQQYNDWLPVTFGQGTKVEIK

SEQ ID NO: 209 - DNA, 720 bp, Artificial Sequence
  Description of Artificial Sequence: Synthetic polynucleotide
gaagtgcaattggtggaaactggaggaggacttgtgcaacctggaggatcattgcggctctcatgcgctgtctccggcttcgccctgtcaaatcacgggatgtcgtgggtcagacgggccccgggaaagggtctggaatgggtgtcggggattgtgtacagcggctccacctactacgccgcttcggtcaagggccgcttcactatttcacgggacaacagccgcaacaccctctatctgcaaatgaactctctccgcccggaggataccgccatctactactgctccgcacacggcggcgaatccgacgtgtggggacagggaaccactgtcaccgtgtcgtccgcatccggtggcggaggatcgggtggccgggcctccgggggcggcggcagcgagactaccctgacccagtcccctgccactctgtccgtgagcccgggagagagagccacccttagctgccgggccagccagagcgtgggctccaacctggcctggtaccagcagaagccaggacagggtcccaggctgctgatctacggagcctccactcgcgcgaccggcatccccgcgaggttctccgggtcgggttccgggaccgagttcaccctgaccatctcctccctccaaccggaggacttcgcggtgtactactgtcagcagtacaacgattggctgcccgtgacatttggacaggggacgaaggtggaaatcaaa

SEQ ID NO: 210 - protein, 115 aa, Artificial Sequence; identical to SEQ ID NO: 180
  Description of Artificial Sequence: Synthetic polypeptide

SEQ ID NO: 211 - protein, 108 aa, Artificial Sequence
  Description of Artificial Sequence: Synthetic polypeptide
ETTLTQSPATLSVSPGERATLSCRASQSVGSNLAWYQQKPGQGPRLLIYGASTRATGIPARFSGSGSGTEFTLTISSLQPEDFAVYYCQQYNDWLPVTFGQGTKVEIK

SEQ ID NO: 212 - protein, 484 aa, Artificial Sequence
  Description of Artificial Sequence: Synthetic polypeptide
MALPVTALLLPLALLLHAARPEVQLVETGGGLVQPGGSLRLSCAVSGFALSNHGMSWVRRAPGKGLEWVSGIVYSGSTYYAASVKGRFTISRDNSRNTLYLQMNSLRPEDTAIYYCSAHGGESDVWGQGTTVTVSSASGGGGSGGRASGGGGSETTLTQSPATLSVSPGERATLSCRASQSVGSNLAWYQQKPGQGPRLLIYGASTRATGIPARFSGSGSGTEFTLTISSLQPEDFAVYYCQQYNDWLPVTFGQGTKVEIKTTTPAPRPPTPAPTIASQPLSLRPEACRPAAGGAVHTRGLDFACDIYIWAPLAGTCGVLLLSLVITLYCKRGRKKLLYIFKQPFMRPVQTTQEEDGCSCRFPEEEEGGCELRVKFSRSADAPAYKQGQNQLYNELNLGRREEYDVLDKRRGRDPEMGGKPRRKNPQEGLYNELQKDKMAEAYSEIGMKGERRRGKGHDGLYQGLSTATKDTYDALHMQALPPR

SEQ ID NO: 213 - DNA, 1452 bp, Artificial Sequence
  Description of Artificial Sequence: Synthetic polynucleotide
atggccctccctgtcaccgccctgctgcttccgctggctcttctgctccacgccgctcggcccgaagtgcaattggtggaaactggaggaggacttgtgcaacctggaggatcattgcggctctcatgcgctgtctccggcttcgccctgtcaaatcacgggatgtcgtgggtcagacgggccccgggaaagggtctggaatgggtgtcggggattgtgtacagcggctccacctactacgccgcttcggtcaagggccgcttcactatttcacgggacaacagccgcaacaccctctatctgcaaatgaactctctccgcccggaggataccgccatctactactgctccgcacacggcggcgaatccgacgtgtggggacagggaaccactgtcaccgtgtcgtccgcatccggtggcggaggatcgggtggccgggcctccgggggcggcggcagcgagactaccctgacccagtcccctgccactctgtccgtgagcccgggagagagagccacccttagctgccgggccagccagagcgtgggctccaacctggcctggtaccagcagaagccaggacagggtcccaggctgctgatctacggagcctccactcgcgcgaccggcatccccgcgaggttctccgggtcgggttccgggaccgagttcaccctgaccatctcctccctccaaccggaggacttcgcggtgtactactgtcagcagtacaacgattggctgcccgtgacatttggacaggggacgaaggtggaaatcaaaaccactaccccagcaccgaggccacccaccccggctcctaccatcgcctcccagcctctgtccctgcgtccggaggcatgtagacccgcagctggtggggccgtgcatacccggggtcttgacttcgcctgcgatatctacatttgggcccctctggctggtacttgcggggtcctgctgctttcactcgtgatcactctttactgtaagcgcggtcggaagaagctgctgtacatctttaagcaacccttcatgaggcctgtgcagactactcaagaggaggacggctgttcatgccggttcccagaggaggaggaaggcggctgcgaactgcgcgtgaaattcagccgcagcgcagatgctccagcctacaagcaggggcagaaccagctctacaacgaactcaatcttggtcggagagaggagtacgacgtgctggacaagcggagaggacgggacccagaaatgggcgggaagccgcgcagaaagaatccccaagagggcctgtacaacgagctccaaaaggataagatggcagaagcctatagcgagattggtatgaaaggggaacgcagaagaggcaaaggccacgacggactgtaccagggactcagcaccgccaccaaggacacctatgacgctcttcacatgcaggccctgccgcctcgg

SEQ ID NO: 214 - protein, 241 aa, Artificial Sequence
  Description of Artificial Sequence: Synthetic polypeptide
EVQLVESGGGLVQPGGSLRLSCAVSGFALSNHGMSWVRRAPGKGLEWVSGIVYSGSTYYAASVKGRFTISRDNSRNTLYLQMNSLRPEDTAIYYCSAHGGESDVWGQGTTVTVSSASGGGGSGGRASGGGGSEIVLTQSPGTLSLSPGERATLSCRASQSIGSSSLAWYQQKPGQAPRLLMYGASSRASGIPDRFSGSGSGTDFTLTISRLEPEDFAVYYCQQYAGSPPFTFGQGTKVEIK

SEQ ID NO: 215 - DNA, 723 bp, Artificial Sequence
  Description of Artificial Sequence: Synthetic polynucleotide
gaagtgcaattggtggaatctggtggaggacttgtgcaacctggaggatcactgagactgtcatgcgcggtgtccggttttgccctgagcaatcatgggatgtcgtgggtccggcgcgcccccggaaagggtctggaatgggtgtcgggtatcgtctactccgggagcacttactacgccgcgagcgtgaagggccgcttcaccatttcccgcgataactcccgcaacaccctgtacttgcaaatgaactcgctccggcctgaggacactgccatctactactgctccgcacacggaggagaatccgacgtgtggggccagggaactaccgtgaccgtcagcagcgcctccggcggcgggggctcaggcggacgggctagcggcggcggtggctccgagatcgtgctgacccagtcgcctggcactctctcgctgagccccggggaaagggcaaccctgtcctgtcgggccagccagtccattggatcatcctccctcgcctggtatcagcagaaaccgggacaggctccgcggctgcttatgtatggggccagctcaagagcctccggcattcccgaccggttctccgggtccggttccggcaccgatttcaccctgactatctcgaggctggagccagaggacttcgccgtgtactactgccagcagtacgcggggtccccgccgttcacgttcggacagggaaccaaggtcgagatcaag

SEQ ID NO: 216 - protein, 115 aa, Artificial Sequence; identical to SEQ ID NO: 132
  Description of Artificial Sequence: Synthetic polypeptide

SEQ ID NO: 217 - protein, 109 aa, Artificial Sequence
  Description of Artificial Sequence: Synthetic polypeptide
EIVLTQSPGTLSLSPGERATLSCRASQSIGSSSLAWYQQKPGQAPRLLMYGASSRASGIPDRFSGSGSGTDFTLTISRLEPEDFAVYYCQQYAGSPPFTFGQGTKVEIK

SEQ ID NO: 218 - protein, 485 aa, Artificial Sequence
  Description of Artificial Sequence: Synthetic polypeptide
MALPVTALLLPLALLLHAARPEVQLVESGGGLVQPGGSLRLSCAVSGFALSNHGMSWVRRAPGKGLEWVSGIVYSGSTYYAASVKGRFTISRDNSRNTLYLQMNSLRPEDTAIYYCSAHGGESDVWGQGTTVTVSSASGGGGSGGRASGGGGSEIVLTQSPGTLSLSPGERATLSCRASQSIGSSSLAWYQQKPGQAPRLLMYGASSRASGIPDRFSGSGSGTDFTLTISRLEPEDFAVYYCQQYAGSPPFTFGQGTKVEIKTTTPAPRPPTPAPTIASQPLSLRPEACRPAAGGAVHTRGLDFACDIYIWAPLAGTCGVLLLSLVITLYCKRGRKKLLYIFKQPFMRPVQTTQEEDGCSCRFPEEEEGGCELRVKFSRSADAPAYKQGQNQLYNELNLGRREEYDVLDKRRGRDPEMGGKPRRKNPQEGLYNELQKDKMAEAYSEIGMKGERRRGKGHDGLYQGLSTATKDTYDALHMQALPPR

SEQ ID NO: 219 - DNA, 1455 bp, Artificial Sequence
  Description of Artificial Sequence: Synthetic polynucleotide
atggccctccctgtcaccgccctgctgcttccgctggctcttctgctccacgccgctcggcccgaagtgcaattggtggaatctggtggaggacttgtgcaacctggaggatcactgagactgtcatgcgcggtgtccggttttgccctgagcaatcatgggatgtcgtgggtccggcgcgcccccggaaagggtctggaatgggtgtcgggtatcgtctactccgggagcacttactacgccgcgagcgtgaagggccgcttcaccatttcccgcgataactcccgcaacaccctgtacttgcaaatgaactcgctccggcctgaggacactgccatctactactgctccgcacacggaggagaatccgacgtgtggggccagggaactaccgtgaccgtcagcagcgcctccggcggcgggggctcaggcggacgggctagcggcggcggtggctccgagatcgtgctgacccagtcgcctggcactctctcgctgagccccggggaaagggcaaccctgtcctgtcgggccagccagtccattggatcatcctccctcgcctggtatcagcagaaaccgggacaggctccgcggctgcttatgtatggggccagctcaagagcctccggcattcccgaccggttctccgggtccggttccggcaccgatttcaccctgactatctcgaggctggagccagaggacttcgccgtgtactactgccagcagtacgcggggtccccgccgttcacgttcggacagggaaccaaggtcgagatcaagaccactaccccagcaccgaggccacccaccccggctcctaccatcgcctcccagcctctgtccctgcgtccggaggcatgtagacccgcagctggtggggccgtgcatacccggggtcttgacttcgcctgcgatatctacatttgggcccctctggctggtacttgcggggtcctgctgctttcactcgtgatcactctttactgtaagcgcggtcggaagaagctgctgtacatctttaagcaacccttcatgaggcctgtgcagactactcaagaggaggacggctgttcatgccggttcccagaggaggaggaaggcggctgcgaactgcgcgtgaaattcagccgcagcgcagatgctccagcctacaagcaggggcagaaccagctctacaacgaactcaatcttggtcggagagaggagtacgacgtgctggacaagcggagaggacgggacccagaaatgggcgggaagccgcgcagaaagaatccccaagagggcctgtacaacgagctccaaaaggataagatggcagaagcctatagcgagattggtatgaaaggggaacgcagaagaggcaaaggccacgacggactgtaccagggactcagcaccgccaccaaggacacctatgacgctcttcacatgcaggccctgccgcctcgg

SEQ ID NO: 220 - protein, 243 aa, Artificial Sequence
  Description of Artificial Sequence: Synthetic polypeptide
QVQLQESGPGLVKPSETLSLTCTVSGGSISSSYYYWGWIRQPPGKGLEWIGSIYYSGSAYYNPSLKSRVTISVDTSKNQFSLRLSSVTAADTAVYYCARHWQEWPDAFDIWGQGTMVTVSSGGGGSGGGGSGGGGSETTLTQSPAFMSATPGDKVIISCKASQDIDDAMNWYQQKPGEAPLFIIQSATSPVPGIPPRFSGSGFGTDFSLTINNIESEDAAYYFCLQHDNFPLTFGQGTKLEIK

SEQ ID NO: 221 - DNA, 729 bp, Artificial Sequence
  Description of Artificial Sequence: Synthetic polynucleotide
caagtgcagcttcaggaaagcggaccgggcctggtcaagccatccgaaactctctccctgacttgcactgtgtctggcggttccatctcatcgtcgtactactactggggctggattaggcagccgcccggaaagggactggagtggatcggaagcatctactattccggctcggcgtactacaaccctagcctcaagtcgagagtgaccatctccgtggatacctccaagaaccagttttccctgcgcctgagctccgtgaccgccgctgacaccgccgtgtactactgtgctcggcattggcaggaatggcccgatgccttcgacatttggggccagggcactatggtcactgtgtcatccgggggtggaggcagcgggggaggagggtccggggggggaggttcagagacaaccttgacccagtcacccgcattcatgtccgccactccgggagacaaggtcatcatctcgtgcaaagcgtcccaggatatcgacgatgccatgaattggtaccagcagaagcctggcgaagcgccgctgttcattatccaatccgcaacctcgcccgtgcctggaatcccaccgcggttcagcggcagcggtttcggaaccgacttttccctgaccattaacaacattgagtccgaggacgccgcctactacttctgcctgcaacacgacaacttccctctcacgttcggccagggaaccaagctggaaatcaag

SEQ ID NO: 222 - protein, 121 aa, Artificial Sequence
  Description of Artificial Sequence: Synthetic polypeptide
QVQLQESGPGLVKPSETLSLTCTVSGGSISSSYYYWGWIRQPPGKGLEWIGSIYYSGSAYYNPSLKSRVTISVDTSKNQFSLRLSSVTAADTAVYYCARHWQEWPDAFDIWGQGTMVTVSS

SEQ ID NO: 223 - protein, 107 aa, Artificial Sequence
  Description of Artificial Sequence: Synthetic polypeptide
ETTLTQSPAFMSATPGDKVIISCKASQDIDDAMNWYQQKPGEAPLFIIQSATSPVPGIPPRFSGSGFGTDFSLTINNIESEDAAYYFCLQHDNFPLTFGQGTKLEIK

SEQ ID NO: 224 - protein, 487 aa, Artificial Sequence
  Description of Artificial Sequence: Synthetic polypeptide
MALPVTALLLPLALLLHAARPQVQLQESGPGLVKPSETLSLTCTVSGGSISSSYYYWGWIRQPPGKGLEWIGSIYYSGSAYYNPSLKSRVTISVDTSKNQFSLRLSSVTAADTAVYYCARHWQEWPDAFDIWGQGTMVTVSSGGGGSGGGGSGGGGSETTLTQSPAFMSATPGDKVIISCKASQDIDDAMNWYQQKPGEAPLFIIQSATSPVPGIPPRFSGSGFGTDFSLTINNIESEDAAYYFCLQHDNFPLTFGQGTKLEIKTTTPAPRPPTPAPTIASQPLSLRPEACRPAAGGAVHTRGLDFACDIYIWAPLAGTCGVLLLSLVITLYCKRGRKKLLYIFKQPFMRPVQTTQEEDGCSCRFPEEEEGGCELRVKFSRSADAPAYKQGQNQLYNELNLGRREEYDVLDKRRGRDPEMGGKPRRKNPQEGLYNELQKDKMAEAYSEIGMKGERRRGKGHDGLYQGLSTATKDTYDALHMQALPPR

SEQ ID NO: 225 - DNA, 1461 bp, Artificial Sequence
  Description of Artificial Sequence: Synthetic polynucleotide
atggccctccctgtcaccgccctgctgcttccgctggctcttctgctccacgccgctcggccccaagtgcagcttcaggaaagcggaccgggcctggtcaagccatccgaaactctctccctgacttgcactgtgtctggcggttccatctcatcgtcgtactactactggggctggattaggcagccgcccggaaagggactggagtggatcggaagcatctactattccggctcggcgtactacaaccctagcctcaagtcgagagtgaccatctccgtggatacctccaagaaccagttttccctgcgcctgagctccgtgaccgccgctgacaccgccgtgtactactgtgctcggcattggcaggaatggcccgatgccttcgacatttggggccagggcactatggtcactgtgtcatccgggggtggaggcagcgggggaggagggtccggggggggaggttcagagacaaccttgacccagtcacccgcattcatgtccgccactccgggagacaaggtcatcatctcgtgcaaagcgtcccaggatatcgacgatgccatgaattggtaccagcagaagcctggcgaagcgccgctgttcattatccaatccgcaacctcgcccgtgcctggaatcccaccgcggttcagcggcagcggtttcggaaccgacttttccctgaccattaacaacattgagtccgaggacgccgcctactacttctgcctgcaacacgacaacttccctctcacgttcggccagggaaccaagctggaaatcaagaccactaccccagcaccgaggccacccaccccggctcctaccatcgcctcccagcctctgtccctgcgtccggaggcatgtagacccgcagctggtggggccgtgcatacccggggtcttgacttcgcctgcgatatctacatttgggcccctctggctggtacttgcggggtcctgctgctttcactcgtgatcactctttactgtaagcgcggtcggaagaagctgctgtacatctttaagcaacccttcatgaggcctgtgcagactactcaagaggaggacggctgttcatgccggttcccagaggaggaggaaggcggctgcgaactgcgcgtgaaattcagccgcagcgcagatgctccagcctacaagcaggggcagaaccagctctacaacgaactcaatcttggtcggagagaggagtacgacgtgctggacaagcggagaggacgggacccagaaatgggcgggaagccgcgcagaaagaatccccaagagggcctgtacaacgagctccaaaaggataagatggcagaagcctatagcgagattggtatgaaaggggaacgcagaagaggcaaaggccacgacggactgtaccagggactcagcaccgccaccaaggacacctatgacgctcttcacatgcaggccctgccgcctcgg

SEQ ID NO: 226 - protein, 244 aa, Artificial Sequence
  Description of Artificial Sequence: Synthetic polypeptide
VNLRESGPALVKPTQTLTLTCTFSGFSLRTSGMCVSWIRQPPGKALEWLARIDWDEDKFYSTSLKTRLTISKDTSDNQVVLRMTNMDPADTATYYCARSGAGGTSATAFDIWGPGTMVTVSSGGGGSGGGGSGGGGSDIQMTQSPSSLSASVGDRVTITCRASQDIYNNLAWFQLKPGSAPRSLMYAANKSQSGVPSRFSGSASGTDFTLTISSLQPEDFATYYCQHYYRFPYSFGQGTKLEIK

SEQ ID NO: 227 - DNA, 735 bp, Artificial Sequence
  Description of Artificial Sequence: Synthetic polynucleotide
caagtcaatctgcgcgaatccggccccgccttggtcaagcctacccagaccctcactctgacctgtactttctccggcttctccctgcggacttccgggatgtgcgtgtcctggatcagacagcctccgggaaaggccctggagtggctcgctcgcattgactgggatgaggacaagttctactccacctcactcaagaccaggctgaccatcagcaaagatacctctgacaaccaagtggtgctccgcatgaccaacatggacccagccgacactgccacttactactgcgcgaggagcggagcgggcggaacctccgccaccgccttcgatatttggggcccgggtaccatggtcaccgtgtcaagcggaggaggggggtccgggggcggcggttccgggggaggcggatcggacattcagatgactcagtcaccatcgtccctgagcgctagcgtgggcgacagagtgacaatcacttgccgggcatcccaggacatctataacaaccttgcgtggttccagctgaagcctggttccgcaccgcggtcacttatgtacgccgccaacaagagccagtcgggagtgccgtcccggttttccggttcggcctcgggaactgacttcaccctgacgatctccagcctgcaacccgaggatttcgccacctactactgccagcactactaccgctttccctactcgttcggacagggaaccaagctggaaatcaag

SEQ ID NO: 228 - protein, 123 aa, Artificial Sequence
  Description of Artificial Sequence: Synthetic polypeptide
QVNLRESGPALVKPTQTLTLTCTFSGFSLRTSGMCVSWIRQPPGKALEWLARIDWDEDKFYSTSLKTRLTISKDTSDNQVVLRMTNMDPADTATYYCARSGAGGTSATAFDIWGPGTMVTVSS

SEQ ID NO: 229 - protein, 107 aa, Artificial Sequence
  Description of Artificial Sequence: Synthetic polypeptide
DIQMTQSPSSLSASVGDRVTITCRASQDIYNNLAWFQLKPGSAPRSLMYAANKSQSGVPSRFSGSASGTDFTLTISSLQPEDFATYYCQHYYRFPYSFGQGTKLEIK

SEQ ID NO: 230 - protein, 489 aa, Artificial Sequence
  Description of Artificial Sequence: Synthetic polypeptide
MALPVTALLLPLALLLHAARPQVNLRESGPALVKPTQTLTLTCTFSGFSLRTSGMCVSWIRQPPGKALEWLARIDWDEDKFYSTSLKTRLTISKDTSDNQVVLRMTNMDPADTATYYCARSGAGGTSATAFDIWGPGTMVTVSSGGGGSGGGGSGGGGSDIQMTQSPSSLSASVGDRVTITCRASQDIYNNLAWFQLKPGSAPRSLMYAANKSQSGVPSRFSGSASGTDFTLTISSLQPEDFATYYCQHYYRFPYSFGQGTKLEIKTTTPAPRPPTPAPTIASQPLSLRPEACRPAAGGAVHTRGLDFACDIYIWAPLAGTCGVLLLSLVITLYCKRGRKKLLYIFKQPFMRPVQTTQEEDGCSCRFPEEEEGGCELRVKFSRSADAPAYKQGQNQLYNELNLGRREEYDVLDKRRGRDPEMGGKPRRKNPQEGLYNELQKDKMAEAYSEIGMKGERRRGKGHDGLYQGLSTATKDTYDALHMQALPPR

SEQ ID NO: 231 - DNA, 1467 bp, Artificial Sequence
  Description of Artificial Sequence: Synthetic polynucleotide
atggccctccctgtcaccgccctgctgcttccgctggctcttctgctccacgccgctcggccccaagtcaatctgcgcgaatccggccccgccttggtcaagcctacccagaccctcactctgacctgtactttctccggcttctccctgcggacttccgggatgtgcgtgtcctggatcagacagcctccgggaaaggccctggagtggctcgctcgcattgactgggatgaggacaagttctactccacctcactcaagaccaggctgaccatcagcaaagatacctctgacaaccaagtggtgctccgcatgaccaacatggacccagccgacactgccacttactactgcgcgaggagcggagcgggcggaacctccgccaccgccttcgatatttggggcccgggtaccatggtcaccgtgtcaagcggaggaggggggtccgggggcggcggttccgggggaggcggatcggacattcagatgactcagtcaccatcgtccctgagcgctagcgtgggcgacagagtgacaatcacttgccgggcatcccaggacatctataacaaccttgcgtggttccagctgaagcctggttccgcaccgcggtcacttatgtacgccgccaacaagagccagtcgggagtgccgtcccggttttccggttcggcctcgggaactgacttcaccctgacgatctccagcctgcaacccgaggatttcgccacctactactgccagcactactaccgctttccctactcgttcggacagggaaccaagctggaaatcaagaccactaccccagcaccgaggccacccaccccggctcctaccatcgcctcccagcctctgtccctgcgtccggaggcatgtagacccgcagctggtggggccgtgcatacccggggtcttgacttcgcctgcgatatctacatttgggcccctctggctggtacttgcggggtcctgctgctttcactcgtgatcactctttactgtaagcgcggtcggaagaagctgctgtacatctttaagcaacccttcatgaggcctgtgcagactactcaagaggaggacggctgttcatgccggttcccagaggaggaggaaggcggctgcgaactgcgcgtgaaattcagccgcagcgcagatgctccagcctacaagcaggggcagaaccagctctacaacgaactcaatcttggtcggagagaggagtacgacgtgctggacaagcggagaggacgggacccagaaatgggcgggaagccgcgcagaaagaatccccaagagggcctgtacaacgagctccaaaaggataagatggcagaagcctatagcgagattggtatgaaaggggaacgcagaagaggcaaaggccacgacggactgtaccagggactcagcaccgccaccaaggacacctatgacgctcttcacatgcaggccctgccgcctcgg

SEQ ID NO: 232 - protein, 246 aa, Artificial Sequence
  Description of Artificial Sequence: Synthetic polypeptide
EVQLVESGGGLVKPGGSLRLSCAASGFTFSSYSMNWVRQAPGKGLEWVSSISSSSSYIYYADSVKGRFTISRDNAKNSLYLQMNSLRAEDTAVYYCAKTIAAVYAFDIWGQGTTVTVSSGGGGSGGGGSGGGGSEIVLTQSPLSLPVTPEEPASISCRSSQSLLHSNGYNYLDWYLQKPGQSPQLLIYLGSNRASGVPDRFSGSGSGTDFTLKISRVEAEDVGVYYCMQALQTPYTFGQGTKLEIK

SEQ ID NO: 233 - DNA, 738 bp, Artificial Sequence
  Description of Artificial Sequence: Synthetic polynucleotide
gaagtgcagcttgtcgaatccggggggggactggtcaagccgggcggatcactgagactgtcctgcgccgcgagcggcttcacgttctcctcctactccatgaactgggtccgccaagcccccgggaagggactggaatgggtgtcctctatctcctcgtcgtcgtcctacatctactacgccgactccgtgaagggaagattcaccatttcccgcgacaacgcaaagaactcactgtacttgcaaatgaactcactccgggccgaagatactgctgtgtactattgcgccaagactattgccgccgtctacgctttcgacatctggggccagggaaccaccgtgactgtgtcgtccggtggtggtggctcgggcggaggaggaagcggcggcggggggtccgagattgtgctgacccagtcgccactgagcctccctgtgacccccgaggaacccgccagcatcagctgccggtccagccagtccctgctccactccaacggatacaattacctcgattggtaccttcagaagcctggacaaagcccgcagctgctcatctacttgggatcaaaccgcgcgtcaggagtgcctgaccggttctccggctcgggcagcggtaccgatttcaccctgaaaatctccagggtggaggcagaggacgtgggagtgtattactgtatgcaggcgctgcagactccgtacacatttgggcagggcaccaagctggagatcaag

SEQ ID NO: 234 - protein, 119 aa, Artificial Sequence
  Description of Artificial Sequence: Synthetic polypeptide
EVQLVESGGGLVKPGGSLRLSCAASGFTFSSYSMNWVRQAPGKGLEWVSSISSSSSYIYYADSVKGRFTISRDNAKNSLYLQMNSLRAEDTAVYYCAKTIAAVYAFDIWGQGTTVTVSS

SEQ ID NO: 235 - protein, 112 aa, Artificial Sequence
  Description of Artificial Sequence: Synthetic polypeptide
EIVLTQSPLSLPVTPEEPASISCRSSQSLLHSNGYNYLDWYLQKPGQSPQLLIYLGSNRASGVPDRFSGSGSGTDFTLKISRVEAEDVGVYYCMQALQTPYTFGQGTKLEIK

SEQ ID NO: 236 - protein, 490 aa, Artificial Sequence
  Description of Artificial Sequence: Synthetic polypeptide
MALPVTALLLPLALLLHAARPEVQLVESGGGLVKPGGSLRLSCAASGFTFSSYSMNWVRQAPGKGLEWVSSISSSSSYIYYADSVKGRFTISRDNAKNSLYLQMNSLRAEDTAVYYCAKTIAAVYAFDIWGQGTTVTVSSGGGGSGGGGSGGGGSEIVLTQSPLSLPVTPEEPASISCRSSQSLLHSNGYNYLDWYLQKPGQSPQLLIYLGSNRASGVPDRFSGSGSGTDFTLKISRVEAEDVGVYYCMQALQTPYTFGQGTKLEIKTTTPAPRPPTPAPTIASQPLSLRPEACRPAAGGAVHTRGLDFACDIYIWAPLAGTCGVLLLSLVITLYCKRGRKKLLYIFKQPFMRPVQTTQEEDGCSCRFPEEEEGGCELRVKFSRSADAPAYKQGQNQLYNELNLGRREEYDVLDKRRGRDPEMGGKPRRKNPQEGLYNELQKDKMAEAYSEIGMKGERRRGKGHDGLYQGLSTATKDTYDALHMQALPPR

SEQ ID NO: 237 - DNA, 1470 bp, Artificial Sequence
  Description of Artificial Sequence: Synthetic polynucleotide
atggccctccctgtcaccgccctgctgcttccgctggctcttctgctccacgccgctcggcccgaagtgcagcttgtcgaatccggggggggactggtcaagccgggcggatcactgagactgtcctgcgccgcgagcggcttcacgttctcctcctactccatgaactgggtccgccaagcccccgggaagggactggaatgggtgtcctctatctcctcgtcgtcgtcctacatctactacgccgactccgtgaagggaagattcaccatttcccgcgacaacgcaaagaactcactgtacttgcaaatgaactcactccgggccgaagatactgctgtgtactattgcgccaagactattgccgccgtctacgctttcgacatctggggccagggaaccaccgtgactgtgtcgtccggtggtggtggctcgggcggaggaggaagcggcggcggggggtccgagattgtgctgacccagtcgccactgagcctccctgtgacccccgaggaacccgccagcatcagctgccggtccagccagtccctgctccactccaacggatacaattacctcgattggtaccttcagaagcctggacaaagcccgcagctgctcatctacttgggatcaaaccgcgcgtcaggagtgcctgaccggttctccggctcgggcagcggtaccgatttcaccctgaaaatctccagggtggaggcagaggacgtgggagtgtattactgtatgcaggcgctgcagactccgtacacatttgggcagggcaccaagctggagatcaagaccactaccccagcaccgaggccacccaccccggctcctaccatcgcctcccagcctctgtccctgcgtccggaggcatgtagacccgcagctggtggggccgtgcatacccggggtcttgacttcgcctgcgatatctacatttgggcccctctggctggtacttgcggggtcctgctgctttcactcgtgatcactctttactgtaagcgcggtcggaagaagctgctgtacatctttaagcaacccttcatgaggcctgtgcagactactcaagaggaggacggctgttcatgccggttcccagaggaggaggaaggcggctgcgaactgcgcgtgaaattcagccgcagcgcagatgctccagcctacaagcaggggcagaaccagctctacaacgaactcaatcttggtcggagagaggagtacgacgtgctggacaagcggagaggacgggacccagaaatgggcgggaagccgcgcagaaagaatccccaagagggcctgtacaacgagctccaaaaggataagatggcagaagcctatagcgagattggtatgaaaggggaacgcagaagaggcaaaggccacgacggactgtaccagggactcagcaccgccaccaaggacacctatgacgctcttcacatgcaggccctgccgcctcgg

SEQ ID NO: 238 - protein, 240 aa, Artificial Sequence
  Description of Artificial Sequence: Synthetic polypeptide
EVQLVESGGGLVKPGGSLRLSCAASGFTFSDYYMSWIRQAPGKGLEWVSYISSSGSTIYYADSVKGRFTISRDNAKNSLYLQMNSLRAEDTAVYYCARDLRGAFDIWGQGTMVTVSSGGGGSGGGGSGGGGSSYVLTQSPSVSAAPGYTATISCGGNNIGTKSVHWYQQKPGQAPLLVIRDDSVRPSKIPGRFSGSNSGNMATLTISGVQAGDEADFYCQVWDSDSEHVVFGGGTKLTVL

SEQ ID NO: 239 - DNA, 720 bp, Artificial Sequence
  Description of Artificial Sequence: Synthetic polynucleotide
gaagtccagctcgtggagtccggcggaggccttgtgaagcctggaggttcgctgagactgtcctgcgccgcctccggcttcaccttctccgactactacatgtcctggatcagacaggccccgggaaagggcctggaatgggtgtcctacatctcgtcatcgggcagcactatctactacgcggactcagtgaaggggcggttcaccatttcccgggataacgcgaagaactcgctgtatctgcaaatgaactcactgagggccgaggacaccgccgtgtactactgcgcccgcgatctccgcggggcatttgacatctggggacagggaaccatggtcacagtgtccagcggagggggaggatcgggtggcggaggttccgggggtggaggctcctcctacgtgctgactcagagcccaagcgtcagcgctgcgcccggttacacggcaaccatctcctgtggcggaaacaacattgggaccaagtctgtgcactggtatcagcagaagccgggccaagctcccctgttggtgatccgcgatgactccgtgcggcctagcaaaattccgggacggttctccggctccaacagcggcaatatggccactctcaccatctcgggagtgcaggccggagatgaagccgacttctactgccaagtctgggactcagactccgagcatgtggtgttcgggggcggaaccaagctgactgtgctc

SEQ ID NO: 240 - protein, 117 aa, Artificial Sequence
  Description of Artificial Sequence: Synthetic polypeptide
EVQLVESGGGLVKPGGSLRLSCAASGFTFSDYYMSWIRQAPGKGLEWVSYISSSGSTIYYADSVKGRFTISRDNAKNSLYLQMNSLRAEDTAVYYCARDLRGAFDIWGQGTMVTVSS

SEQ ID NO: 241 - protein, 108 aa, Artificial Sequence
  Description of Artificial Sequence: Synthetic polypeptide
SYVLTQSPSVSAAPGYTATISCGGNNIGTKSVHWYQQKPGQAPLLVIRDDSVRPSKIPGRFSGSNSGNMATLTISGVQAGDEADFYCQVWDSDSEHVVFGGGTKLTVL

SEQ ID NO: 242 - protein, 484 aa, Artificial Sequence
  Description of Artificial Sequence: Synthetic polypeptide
MALPVTALLLPLALLLHAARPEVQLVESGGGLVKPGGSLRLSCAASGFTFSDYYMSWIRQAPGKGLEWVSYISSSGSTIYYADSVKGRFTISRDNAKNSLYLQMNSLRAEDTAVYYCARDLRGAFDIWGQGTMVTVSSGGGGSGGGGSGGGGSSYVLTQSPSVSAAPGYTATISCGGNNIGTKSVHWYQQKPGQAPLLVIRDDSVRPSKIPGRFSGSNSGNMATLTISGVQAGDEADFYCQVWDSDSEHVVFGGGTKLTVLTTTPAPRPPTPAPTIASQPLSLRPEACRPAAGGAVHTRGLDFACDIYIWAPLAGTCGVLLLSLVITLYCKRGRKKLLYIFKQPFMRPVQTTQEEDGCSCRFPEEEEGGCELRVKFSRSADAPAYKQGQNQLYNELNLGRREEYDVLDKRRGRDPEMGGKPRRKNPQEGLYNELQKDKMAEAYSEIGMKGERRRGKGHDGLYQGLSTATKDTYDALHMQALPPR

SEQ ID NO: 243 - DNA, 1452 bp, Artificial Sequence
  Description of Artificial Sequence: Synthetic polynucleotide
atggccctccctgtcaccgccctgctgcttccgctggctcttctgctccacgccgctcggcccgaagtccagctcgtggagtccggcggaggccttgtgaagcctggaggttcgctgagactgtcctgcgccgcctccggcttcaccttctccgactactacatgtcctggatcagacaggccccgggaaagggcctggaatgggtgtcctacatctcgtcatcgggcagcactatctactacgcggactcagtgaaggggcggttcaccatttcccgggataacgcgaagaactcgctgtatctgcaaatgaactcactgagggccgaggacaccgccgtgtactactgcgcccgcgatctccgcggggcatttgacatctggggacagggaaccatggtcacagtgtccagcggagggggaggatcgggtggcggaggttccgggggtggaggctcctcctacgtgctgactcagagcccaagcgtcagcgctgcgcccggttacacggcaaccatctcctgtggcggaaacaacattgggaccaagtctgtgcactggtatcagcagaagccgggccaagctcccctgttggtgatccgcgatgactccgtgcggcctagcaaaattccgggacggttctccggctccaacagcggcaatatggccactctcaccatctcgggagtgcaggccggagatgaagccgacttctactgccaagtctgggactcagactccgagcatgtggtgttcgggggcggaaccaagctgactgtgctcaccactaccccagcaccgaggccacccaccccggctcctaccatcgcctcccagcctctgtccctgcgtccggaggcatgtagacccgcagctggtggggccgtgcatacccggggtcttgacttcgcctgcgatatctacatttgggcccctctggctggtacttgcggggtcctgctgctttcactcgtgatcactctttactgtaagcgcggtcggaagaagctgctgtacatctttaagcaacccttcatgaggcctgtgcagactactcaagaggaggacggctgttcatgccggttcccagaggaggaggaaggcggctgcgaactgcgcgtgaaattcagccgcagcgcagatgctccagcctacaagcaggggcagaaccagctctacaacgaactcaatcttggtcggagagaggagtacgacgtgctggacaagcggagaggacgggacccagaaatgggcgggaagccgcgcagaaagaatccccaagagggcctgtacaacgagctccaaaaggataagatggcagaagcctatagcgagattggtatgaaaggggaacgcagaagaggcaaaggccacgacggactgtaccagggactcagcaccgccaccaaggacacctatgacgctcttcacatgcaggccctgccgcctcgg

SEQ ID NO: 244 - protein, 241 aa, Artificial Sequence
  Description of Artificial Sequence: Synthetic polypeptide
QVQLVQSGAEVKKPGASVKVSCKPSGYTVTSHYIHWVRRAPGQGLEWMGMINPSGGVTAYSQTLQGRVTMTSDTSSSTVYMELSSLRSEDTAMYYCAREGSGSGWYFDFWGRGTLVTVSSGGGGSGGGGSGGGGSSYVLTQPPSVSVSPGQTASITCSGDGLSKKYVSWYQQKAGQSPVVLISRDKERPSGIPDRFSGSNSADTATLTISGTQAMDEADYYCQAWDDTTVVFGGGTKLTVL

SEQ ID NO: 245 - DNA, 723 bp, Artificial Sequence
  Description of Artificial Sequence: Synthetic polynucleotide
caagtgcagctggtgcagagcggggccgaagtcaagaagccgggagcctccgtgaaagtgtcctgcaagccttcgggatacaccgtgacctcccactacattcattgggtccgccgcgcccccggccaaggactcgagtggatgggcatgatcaaccctagcggcggagtgaccgcgtacagccagacgctgcagggacgcgtgactatgacctcggatacctcctcctccaccgtctatatggaactgtccagcctgcggtccgaggataccgccatgtactactgcgcccgggaaggatcaggctccgggtggtatttcgacttctggggaagaggcaccctcgtgactgtgtcatctgggggagggggttccggtggtggcggatcgggaggaggcggttcatcctacgtgctgacccagccaccctccgtgtccgtgagccccggccagactgcatcgattacatgtagcggcgacggcctctccaagaaatacgtgtcgtggtaccagcagaaggccggacagagcccggtggtgctgatctcaagagataaggagcggcctagcggaatcccggacaggttctcgggttccaactccgcggacactgctactctgaccatctcggggacccaggctatggacgaagccgattactactgccaagcctgggacgacactactgtcgtgtttggagggggcaccaagttgaccgtcctt

SEQ ID NO: 246 - protein, 120 aa, Artificial Sequence
  Description of Artificial Sequence: Synthetic polypeptide
QVQLVQSGAEVKKPGASVKVSCKPSGYTVTSHYIHWVRRAPGQGLEWMGMINPSGGVTAYSQTLQGRVTMTSDTSSSTVYMELSSLRSEDTAMYYCAREGSGSGWYFDFWGRGTLVTVSS

SEQ ID NO: 247 - protein, 106 aa, Artificial Sequence
  Description of Artificial Sequence: Synthetic polypeptide
SYVLTQPPSVSVSPGQTASITCSGDGLSKKYVSWYQQKAGQSPVVLISRDKERPSGIPDRFSGSNSADTATLTISGTQAMDEADYYCQAWDDTTVVFGGGTKLTVL

SEQ ID NO: 248 - protein, 485 aa, Artificial Sequence
  Description of Artificial Sequence: Synthetic polypeptide
MALPVTALLLPLALLLHAARPQVQLVQSGAEVKKPGASVKVSCKPSGYTVTSHYIHWVRRAPGQGLEWMGMINPSGGVTAYSQTLQGRVTMTSDTSSSTVYMELSSLRSEDTAMYYCAREGSGSGWYFDFWGRGTLVTVSSGGGGSGGGGSGGGGSSYVLTQPPSVSVSPGQTASITCSGDGLSKKYVSWYQQKAGQSPVVLISRDKERPSGIPDRFSGSNSADTATLTISGTQAMDEADYYCQAWDDTTVVFGGGTKLTVLTTTPAPRPPTPAPTIASQPLSLRPEACRPAAGGAVHTRGLDFACDIYIWAPLAGTCGVLLLSLVITLYCKRGRKKLLYIFKQPFMRPVQTTQEEDGCSCRFPEEEEGGCELRVKFSRSADAPAYKQGQNQLYNELNLGRREEYDVLDKRRGRDPEMGGKPRRKNPQEGLYNELQKDKMAEAYSEIGMKGERRRGKGHDGLYQGLSTATKDTYDALHMQALPPR

SEQ ID NO: 249 - DNA, 1455 bp, Artificial Sequence
  Description of Artificial Sequence: Synthetic polynucleotide
atggccctccctgtcaccgccctgctgcttccgctggctcttctgctccacgccgctcggccccaagtgcagctggtgcagagcggggccgaagtcaagaagccgggagcctccgtgaaagtgtcctgcaagccttcgggatacaccgtgacctcccactacattcattgggtccgccgcgcccccggccaaggactcgagtggatgggcatgatcaaccctagcggcggagtgaccgcgtacagccagacgctgcagggacgcgtgactatgacctcggatacctcctcctccaccgtctatatggaactgtccagcctgcggtccgaggataccgccatgtactactgcgcccgggaaggatcaggctccgggtggtatttcgacttctggggaagaggcaccctcgtgactgtgtcatctgggggagggggttccggtggtggcggatcgggaggaggcggttcatcctacgtgctgacccagccaccctccgtgtccgtgagccccggccagactgcatcgattacatgtagcggcgacggcctctccaagaaatacgtgtcgtggtaccagcagaaggccggacagagcccggtggtgctgatctcaagagataaggagcggcctagcggaatcccggacaggttctcgggttccaactccgcggacactgctactctgaccatctcggggacccaggctatggacgaagccgattactactgccaagcctgggacgacactactgtcgtgtttggagggggcaccaagttgaccgtccttaccactaccccagcaccgaggccacccaccccggctcctaccatcgcctcccagcctctgtccctgcgtccggaggcatgtagacccgcagctggtggggccgtgcatacccggggtcttgacttcgcctgcgatatctacatttgggcccctctggctggtacttgcggggtcctgctgctttcactcgtgatcactctttactgtaagcgcggtcggaagaagctgctgtacatctttaagcaacccttcatgaggcctgtgcagactactcaagaggaggacggctgttcatgccggttcccagaggaggaggaaggcggctgcgaactgcgcgtgaaattcagccgcagcgcagatgctccagcctacaagcaggggcagaaccagctctacaacgaactcaatcttggtcggagagaggagtacgacgtgctggacaagcggagaggacgggacccagaaatgggcgggaagccgcgcagaaagaatccccaagagggcctgtacaacgagctccaaaaggataagatggcagaagcctatagcgagattggtatgaaaggggaacgcagaagaggcaaaggccacgacggactgtaccagggactcagcaccgccaccaaggacacctatgacgctcttcacatgcaggccctgccgcctcgg

SEQ ID NO: 250 - protein, 245 aa, Artificial Sequence
  Description of Artificial Sequence: Synthetic polypeptide
QVQLQESGPGLVKPSQTLSLTCTVSGGSISSGGYYWSWIRQHPGKGLEWIGYIYYSGSTYYNPSLKSRVTISVDTSKNQFSLKLSSVTAADTAVYYCARAGIAARLRGAFDIWGQGTMVTVSSGGGGSGGGGSGGGGSDIVMTQSPSSVSASVGDRVIITCRASQGIRNWLAWYQQKPGKAPNLLIYAASNLQSGVPSRFSGSGSGADFTLTISSLQPEDVATYYCQKYNSAPFTFGPGTKVDIK

SEQ ID NO: 251 - DNA, 735 bp, Artificial Sequence
  Description of Artificial Sequence: Synthetic polynucleotide
caagtgcagcttcaggagagcggcccgggactcgtgaagccgtcccagaccctgtccctgacttgcaccgtgtcgggaggaagcatctcgagcggaggctactattggtcgtggattcggcagcaccctggaaagggcctggaatggatcggctacatctactactccggctcgacctactacaacccatcgctgaagtccagagtgacaatctcagtggacacgtccaagaatcagttcagcctgaagctctcttccgtgactgcggccgacaccgccgtgtactactgcgcacgcgctggaattgccgcccggctgaggggtgccttcgacatttggggacagggcaccatggtcaccgtgtcctccggcggcggaggttccgggggtggaggctcaggaggaggggggtccgacatcgtcatgactcagtcgccctcaagcgtcagcgcgtccgtcggggacagagtgatcatcacctgtcgggcgtcccagggaattcgcaactggctggcctggtatcagcagaagcccggaaaggcccccaacctgttgatctacgccgcctcaaacctccaatccggggtgccgagccgcttcagcggctccggttcgggtgccgatttcactctgaccatctcctccctgcaacctgaagatgtggctacctactactgccaaaagtacaactccgcaccttttactttcggaccggggaccaaagtggacattaag

SEQ ID NO: 252 - protein, 123 aa, Artificial Sequence
  Description of Artificial Sequence: Synthetic polypeptide
QVQLQESGPGLVKPSQTLSLTCTVSGGSISSGGYYWSWIRQHPGKGLEWIGYIYYSGSTYYNPSLKSRVTISVDTSKNQFSLKLSSVTAADTAVYYCARAGIAARLRGAFDIWGQGTMVTVSS

SEQ ID NO: 253 - protein, 107 aa, Artificial Sequence
  Description of Artificial Sequence: Synthetic polypeptide
DIVMTQSPSSVSASVGDRVIITCRASQGIRNWLAWYQQKPGKAPNLLIYAASNLQSGVPSRFSGSGSGADFTLTISSLQPEDVATYYCQKYNSAPFTFGPGTKVDIK

SEQ ID NO: 254 - protein, 489 aa, Artificial Sequence
  Description of Artificial Sequence: Synthetic polypeptide
MALPVTALLLPLALLLHAARPQVQLQESGPGLVKPSQTLSLTCTVSGGSISSGGYYWSWIRQHPGKGLEWIGYIYYSGSTYYNPSLKSRVTISVDTSKNQFSLKLSSVTAADTAVYYCARAGIAARLRGAFDIWGQGTMVTVSSGGGGSGGGGSGGGGSDIVMTQSPSSVSASVGDRVIITCRASQGIRNWLAWYQQKPGKAPNLLIYAASNLQSGVPSRFSGSGSGADFTLTISSLQPEDVATYYCQKYNSAPFTFGPGTKVDIKTTTPAPRPPTPAPTIASQPLSLRPEACRPAAGGAVHTRGLDFACDIYIWAPLAGTCGVLLLSLVITLYCKRGRKKLLYIFKQPFMRPVQTTQEEDGCSCRFPEEEEGGCELRVKFSRSADAPAYKQGQNQLYNELNLGRREEYDVLDKRRGRDPEMGGKPRRKNPQEGLYNELQKDKMAEAYSEIGMKGERRRGKGHDGLYQGLSTATKDTYDALHMQALPPR

SEQ ID NO: 255 - DNA, 1467 bp, Artificial Sequence
  Description of Artificial Sequence: Synthetic polynucleotide
atggccctccctgtcaccgccctgctgcttccgctggctcttctgctccacgccgctcggccccaagtgcagcttcaggagagcggcccgggactcgtgaagccgtcccagaccctgtccctgacttgcaccgtgtcgggaggaagcatctcgagcggaggctactattggtcgtggattcggcagcaccctggaaagggcctggaatggatcggctacatctactactccggctcgacctactacaacccatcgctgaagtccagagtgacaatctcagtggacacgtccaagaatcagttcagcctgaagctctcttccgtgactgcggccgacaccgccgtgtactactgcgcacgcgctggaattgccgcccggctgaggggtgccttcgacatttggggacagggcaccatggtcaccgtgtcctccggcggcggaggttccgggggtggaggctcaggaggaggggggtccgacatcgtcatgactcagtcgccctcaagcgtcagcgcgtccgtcggggacagagtgatcatcacctgtcgggcgtcccagggaattcgcaactggctggcctggtatcagcagaagcccggaaaggcccccaacctgttgatctacgccgcctcaaacctccaatccggggtgccgagccgcttcagcggctccggttcgggtgccgatttcactctgaccatctcctccctgcaacctgaagatgtggctacctactactgccaaaagtacaactccgcaccttttactttcggaccggggaccaaagtggacattaagaccactaccccagcaccgaggccacccaccccggctcctaccatcgcctcccagcctctgtccctgcgtccggaggcatgtagacccgcagctggtggggccgtgcatacccggggtcttgacttcgcctgcgatatctacatttgggcccctctggctggtacttgcggggtcctgctgctttcactcgtgatcactctttactgtaagcgcggtcggaagaagctgctgtacatctttaagcaacccttcatgaggcctgtgcagactactcaagaggaggacggctgttcatgccggttcccagaggaggaggaaggcggctgcgaactgcgcgtgaaattcagccgcagcgcagatgctccagcctacaagcaggggcagaaccagctctacaacgaactcaatcttggtcggagagaggagtacgacgtgctggacaagcggagaggacgggacccagaaatgggcgggaagccgcgcagaaagaatccccaagagggcctgtacaacgagctccaaaaggataagatggcagaagcctatagcgagattggtatgaaaggggaacgcagaagaggcaaaggccacgacggactgtaccagggactcagcaccgccaccaaggacacctatgacgctcttcacatgcaggccctgccgcctcgg

SEQ ID NO: 256 - protein, 253 aa, Artificial Sequence
  Description of Artificial Sequence: Synthetic polypeptide
QVQLVQSGAEVKKPGSSVKVSCKASGGTFSSYAISWVRQAPGQGLEWMGGIIPIFGTANYAQKFQGRVTITADESTSTAYMELSSLRSEDTAVYYCARRGGYQLLRWDVGLLRSAFDIWGQGTMVTVSSGGGGSGGGGSGGGGSSYVLTQPPSVSVAPGQTARITCGGNNIGSKSVHWYQQKPGQAPVLVLYGKNNRPSGVPDRFSGSRSGTTASLTITGAQAEDEADYYCSSRDSSGDHLRVFGTGTKVTVL

SEQ ID NO: 257 - DNA, 759 bp, Artificial Sequence
  Description of Artificial Sequence: Synthetic polynucleotide
caagtgcagctggtccagtcgggcgccgaggtcaagaagcccgggagctctgtgaaagtgtcctgcaaggcctccgggggcacctttagctcctacgccatctcctgggtccgccaagcaccgggtcaaggcctggagtggatggggggaattatccctatcttcggcactgccaactacgcccagaagttccagggacgcgtgaccattaccgcggacgaatccacctccaccgcttatatggagctgtccagcttgcgctcggaagataccgccgtgtactactgcgcccggaggggtggataccagctgctgagatgggacgtgggcctcctgcggtcggcgttcgacatctggggccagggcactatggtcactgtgtccagcggaggaggcggatcgggaggcggcggatcagggggaggcggttccagctacgtgcttactcaacccccttcggtgtccgtggccccgggacagaccgccagaatcacttgcggaggaaacaacattgggtccaagagcgtgcattggtaccagcagaagccaggacaggcccctgtgctggtgctctacgggaagaacaatcggcccagcggagtgccggacaggttctcgggttcacgctccggtacaaccgcttcactgactatcaccggggcccaggcagaggatgaagcggactactactgttcctcccgggattcatccggcgaccacctccgggtgttcggaaccggaacgaaggtcaccgtgctg

SEQ ID NO: 258 - protein, 129 aa, Artificial Sequence
  Description of Artificial Sequence: Synthetic polypeptide
QVQLVQSGAEVKKPGSSVKVSCKASGGTFSSYAISWVRQAPGQGLEWMGGIIPIFGTANYAQKFQGRVTITADESTSTAYMELSSLRSEDTAVYYCARRGGYQLLRWDVGLLRSAFDIWGQGTMVTVSS

SEQ ID NO: 259 - protein, 109 aa, Artificial Sequence
  Description of Artificial Sequence: Synthetic polypeptide
SYVLTQPPSVSVAPGQTARITCGGNNIGSKSVHWYQQKPGQAPVLVLYGKNNRPSGVPDRFSGSRSGTTASLTITGAQAEDEADYYCSSRDSSGDHLRVFGTGTKVTVL

SEQ ID NO: 260 - protein, 497 aa, Artificial Sequence
  Description of Artificial Sequence: Synthetic polypeptide
MALPVTALLLPLALLLHAARPQVQLVQSGAEVKKPGSSVKVSCKASGGTFSSYAISWVRQAPGQGLEWMGGIIPIFGTANYAQKFQGRVTITADESTSTAYMELSSLRSEDTAVYYCARRGGYQLLRWDVGLLRSAFDIWGQGTMVTVSSGGGGSGGGGSGGGGSSYVLTQPPSVSVAPGQTARITCGGNNIGSKSVHWYQQKPGQAPVLVLYGKNNRPSGVPDRFSGSRSGTTASLTITGAQAEDEADYYCSSRDSSGDHLRVFGTGTKVTVLTTTPAPRPPTPAPTIASQPLSLRPEACRPAAGGAVHTRGLDFACDIYIWAPLAGTCGVLLLSLVITLYCKRGRKKLLYIFKQPFMRPVQTTQEEDGCSCRFPEEEEGGCELRVKFSRSADAPAYKQGQNQLYNELNLGRREEYDVLDKRRGRDPEMGGKPRRKNPQEGLYNELQKDKMAEAYSEIGMKGERRRGKGHDGLYQGLSTATKDTYDALHMQALPPR

SEQ ID NO: 261 - DNA, 1491 bp, Artificial Sequence
  Description of Artificial Sequence: Synthetic polynucleotide
atggccctccctgtcaccgccctgctgcttccgctggctcttctgctccacgccgctcggccccaagtgcagctggtccagtcgggcgccgaggtcaagaagcccgggagctctgtgaaagtgtcctgcaaggcctccgggggcacctttagctcctacgccatctcctgggtccgccaagcaccgggtcaaggcctggagtggatggggggaattatccctatcttcggcactgccaactacgcccagaagttccagggacgcgtgaccattaccgcggacgaatccacctccaccgcttatatggagctgtccagcttgcgctcggaagataccgccgtgtactactgcgcccggaggggtggataccagctgctgagatgggacgtgggcctcctgcggtcggcgttcgacatctggggccagggcactatggtcactgtgtccagcggaggaggcggatcgggaggcggcggatcagggggaggcggttccagctacgtgcttactcaacccccttcggtgtccgtggccccgggacagaccgccagaatcacttgcggaggaaacaacattgggtccaagagcgtgcattggtaccagcagaagccaggacaggcccctgtgctggtgctctacgggaagaacaatcggcccagcggagtgccggacaggttctcgggttcacgctccggtacaaccgcttcactgactatcaccggggcccaggcagaggatgaagcggactactactgttcctcccgggattcatccggcgaccacctccgggtgttcggaaccggaacgaaggtcaccgtgctgaccactaccccagcaccgaggccacccaccccggctcctaccatcgcctcccagcctctgtccctgcgtccggaggcatgtagacccgcagctggtggggccgtgcatacccggggtcttgacttcgcctgcgatatctacatttgggcccctctggctggtacttgcggggtcctgctgctttcactcgtgatcactctttactgtaagcgcggtcggaagaagctgctgtacatctttaagcaacccttcatgaggcctgtgcagactactcaagaggaggacggctgttcatgccggttcccagaggaggaggaaggcggctgcgaactgcgcgtgaaattcagccgcagcgcagatgctccagcctacaagcaggggcagaaccagctctacaacgaactcaatcttggtcggagagaggagtacgacgtgctggacaagcggagaggacgggacccagaaatgggcgggaagccgcgcagaaagaatccccaagagggcctgtacaacgagctccaaaaggataagatggcagaagcctatagcgagattggtatgaaaggggaacgcagaagaggcaaaggccacgacggactgtaccagggactcagcaccgccaccaaggacacctatgacgctcttcacatgcaggccctgccgcctcgg

SEQ ID NO: 262 - protein, 248 aa, Artificial Sequence
  Description of Artificial Sequence: Synthetic polypeptide
EVQLQQSGPGLVKPSQTLSLTCAISGDSVSSNSAAWNWIRQSPSRGLEWLGRTYYRSKWYSFYAISLKSRIIINPDTSKNQFSLQLKSVTPEDTAVYYCARSSPEGLFLYWFDPWGQGTLVTVSSGGDGSGGGGSGGGGSSSELTQDPAVSVALGQTIRITCQGDSLGNYYATWYQQKPGQAPVLVIYGTNNRPSGIPDRFSASSSGNTASLTITGAQAEDEADYYCNSRDSSGHHLLFGTGTKVTVL

SEQ ID NO: 263 - DNA, 744 bp, Artificial Sequence
  Description of Artificial Sequence: Synthetic polynucleotide
gaagtgcagctccaacagtcaggaccggggctcgtgaagccatcccagaccctgtccctgacttgtgccatctcgggagatagcgtgtcatcgaactccgccgcctggaactggattcggcagagcccgtcccgcggactggagtggcttggaaggacctactaccggtccaagtggtactctttctacgcgatctcgctgaagtcccgcattatcattaaccctgatacctccaagaatcagttctccctccaactgaaatccgtcacccccgaggacacagcagtgtattactgcgcacggagcagccccgaaggactgttcctgtattggtttgacccctggggccaggggactcttgtgaccgtgtcgagcggcggagatgggtccggtggcggtggttcggggggcggcggatcatcatccgaactgacccaggacccggctgtgtccgtggcgctgggacaaaccatccgcattacgtgccagggagactccctgggcaactactacgccacttggtaccagcagaagccgggccaagcccctgtgttggtcatctacgggaccaacaacagaccttccggcatccccgaccggttcagcgcttcgtcctccggcaacactgccagcctgaccatcactggagcgcaggccgaagatgaggccgactactactgcaacagcagagactcctcgggtcatcacctcttgttcggaactggaaccaaggtcaccgtgctg

SEQ ID NO: 264 - protein, 125 aa, Artificial Sequence
  Description of Artificial Sequence: Synthetic polypeptide
EVQLQQSGPGLVKPSQTLSLTCAISGDSVSSNSAAWNWIRQSPSRGLEWLGRTYYRSKWYSFYAISLKSRIIINPDTSKNQFSLQLKSVTPEDTAVYYCARSSPEGLFLYWFDPWGQGTLVTVSS

SEQ ID NO: 265 - protein, 108 aa, Artificial Sequence
  Description of Artificial Sequence: Synthetic polypeptide
SSELTQDPAVSVALGQTIRITCQGDSLGNYYATWYQQKPGQAPVLVIYGTNNRPSGIPDRFSASSSGNTASLTITGAQAEDEADYYCNSRDSSGHHLLFGTGTKVTVL

SEQ ID NO: 266 - protein, 492 aa, Artificial Sequence
  Description of Artificial Sequence: Synthetic polypeptide
MALPVTALLLPLALLLHAARPEVQLQQSGPGLVKPSQTLSLTCAISGDSVSSNSAAWNWIRQSPSRGLEWLGRTYYRSKWYSFYAISLKSRIIINPDTSKNQFSLQLKSVTPEDTAVYYCARSSPEGLFLYWFDPWGQGTLVTVSSGGDGSGGGGSGGGGSSSELTQDPAVSVALGQTIRITCQGDSLGNYYATWYQQKPGQAPVLVIYGTNNRPSGIPDRFSASSSGNTASLTITGAQAEDEADYYCNSRDSSGHHLLFGTGTKVTVLTTTPAPRPPTPAPTIASQPLSLRPEACRPAAGGAVHTRGLDFACDIYIWAPLAGTCGVLLLSLVITLYCKRGRKKLLYIFKQPFMRPVQTTQEEDGCSCRFPEEEEGGCELRVKFSRSADAPAYKQGQNQLYNELNLGRREEYDVLDKRRGRDPEMGGKPRRKNPQEGLYNELQKDKMAEAYSEIGMKGERRRGKGHDGLYQGLSTATKDTYDALHMQALPPR

SEQ ID NO: 267 - DNA, 1476 bp, Artificial Sequence
  Description of Artificial Sequence: Synthetic polynucleotide
atggccctccctgtcaccgccctgctgcttccgctggctcttctgctccacgccgctcggcccgaagtgcagctccaacagtcaggaccggggctcgtgaagccatcccagaccctgtccctgacttgtgccatctcgggagatagcgtgtcatcgaactccgccgcctggaactggattcggcagagcccgtcccgcggactggagtggcttggaaggacctactaccggtccaagtggtactctttctacgcgatctcgctgaagtcccgcattatcattaaccctgatacctccaagaatcagttctccctccaactgaaatccgtcacccccgaggacacagcagtgtattactgcgcacggagcagccccgaaggactgttcctgtattggtttgacccctggggccaggggactcttgtgaccgtgtcgagcggcggagatgggtccggtggcggtggttcggggggcggcggatcatcatccgaactgacccaggacccggctgtgtccgtggcgctgggacaaaccatccgcattacgtgccagggagactccctgggcaactactacgccacttggtaccagcagaagccgggccaagcccctgtgttggtcatctacgggaccaacaacagaccttccggcatccccgaccggttcagcgcttcgtcctccggcaacactgccagcctgaccatcactggagcgcaggccgaagatgaggccgactactactgcaacagcagagactcctcgggtcatcacctcttgttcggaactggaaccaaggtcaccgtgctgaccactaccccagcaccgaggccacccaccccggctcctaccatcgcctcccagcctctgtccctgcgtccggaggcatgtagacccgcagctggtggggccgtgcatacccggggtcttgacttcgcctgcgatatctacatttgggcccctctggctggtacttgcggggtcctgctgctttcactcgtgatcactctttactgtaagcgcggtcggaagaagctgctgtacatctttaagcaacccttcatgaggcctgtgcagactactcaagaggaggacggctgttcatgccggttcccagaggaggaggaaggcggctgcgaactgcgcgtgaaattcagccgcagcgcagatgctccagcctacaagcaggggcagaaccagctctacaacgaactcaatcttggtcggagagaggagtacgacgtgctggacaagcggagaggacgggacccagaaatgggcgggaagccgcgcagaaagaatccccaagagggcctgtacaacgagctccaaaaggataagatggcagaagcctatagcgagattggtatgaaaggggaacgcagaagaggcaaaggccacgacggactgtaccagggactcagcaccgccaccaaggacacctatgacgctcttcacatgcaggccctgccgcctcgg

SEQ ID NO: 268 - protein, 246 aa, Artificial Sequence
  Description of Artificial Sequence: Synthetic polypeptide
EVQLVESGGGLVQPGGSLRLSCAASGFTFSSYAMSWVRQAPGKGLEWVSAISGSGGSTYYADSVKGRFTISRDNSKNTLYLQMNSLRAEDTAVYYCAKVEGSGSLDYWGQGTLVTVSSGGGGSGGGGSGGGGSEIVMTQSPGTLSLSPGERATLSCRASQSVSSAYLAWYQQKPGQPPRLLISGASTRATGIPDRFGGSGSGTDFTLTISRLEPEDFAVYYCQHYGSSFNGSSLFTFGQGTRLEIK

SEQ ID NO: 269 - DNA, 738 bp, Artificial Sequence
  Description of Artificial Sequence: Synthetic polynucleotide
gaagtgcagctcgtggagtcaggaggcggcctggtccagccgggagggtcccttagactgtcatgcgccgcaagcggattcactttctcctcctatgccatgagctgggtccgccaagcccccggaaagggactggaatgggtgtccgccatctcggggtctggaggctcaacttactacgctgactccgtgaagggacggttcaccattagccgcgacaactccaagaacaccctctacctccaaatgaactccctgcgggccgaggataccgccgtctactactgcgccaaagtggaaggttcaggatcgctggactactggggacagggtactctcgtgaccgtgtcatcgggcggaggaggttccggcggtggcggctccggcggcggagggtcggagatcgtgatgacccagagccctggtactctgagcctttcgccgggagaaagggccaccctgtcctgccgcgcttcccaatccgtgtcctccgcgtacttggcgtggtaccagcagaagccgggacagccccctcggctgctgatcagcggggccagcacccgggcaaccggaatcccagacagattcgggggttccggcagcggcacagatttcaccctgactatttcgaggttggagcccgaggactttgcggtgtattactgtcagcactacgggtcgtcctttaatggctccagcctgttcacgttcggacaggggacccgcctggaaatcaag

SEQ ID NO: 270 - protein, 118 aa, Artificial Sequence
  Description of Artificial Sequence: Synthetic polypeptide
EVQLVESGGGLVQPGGSLRLSCAASGFTFSSYAMSWVRQAPGKGLEWVSAISGSGGSTYYADSVKGRFTISRDNSKNTLYLQMNSLRAEDTAVYYCAKVEGSGSLDYWGQGTLVTVSS

SEQ ID NO: 271 - protein, 113 aa, Artificial Sequence
  Description of Artificial Sequence: Synthetic polypeptide
EIVMTQSPGTLSLSPGERATLSCRASQSVSSAYLAWYQQKPGQPPRLLISGASTRATGIPDRFGGSGSGTDFTLTISRLEPEDFAVYYCQHYGSSFNGSSLFTFGQGTRLEIK

SEQ ID NO: 272 - protein, 490 aa, Artificial Sequence
  Description of Artificial Sequence: Synthetic polypeptide
MALPVTALLLPLALLLHAARPEVQLVESGGGLVQPGGSLRLSCAASGFTFSSYAMSWVRQAPGKGLEWVSAISGSGGSTYYADSVKGRFTISRDNSKNTLYLQMNSLRAEDTAVYYCAKVEGSGSLDYWGQGTLVTVSSGGGGSGGGGSGGGGSEIVMTQSPGTLSLSPGERATLSCRASQSVSSAYLAWYQQKPGQPPRLLISGASTRATGIPDRFGGSGSGTDFTLTISRLEPEDFAVYYCQHYGSSFNGSSLFTFGQGTRLEIKTTTPAPRPPTPAPTIASQPLSLRPEACRPAAGGAVHTRGLDFACDIYIWAPLAGTCGVLLLSLVITLYCKRGRKKLLYIFKQPFMRPVQTTQEEDGCSCRFPEEEEGGCELRVKFSRSADAPAYKQGQNQLYNELNLGRREEYDVLDKRRGRDPEMGGKPRRKNPQEGLYNELQKDKMAEAYSEIGMKGERRRGKGHDGLYQGLSTATKDTYDALHMQALPPR

SEQ ID NO: 273 - DNA, 1470 bp, Artificial Sequence
  Description of Artificial Sequence: Synthetic polynucleotide
atggccctccctgtcaccgccctgctgcttccgctggctcttctgctccacgccgctcggcccgaagtgcagctcgtggagtcaggaggcggcctggtccagccgggagggtcccttagactgtcatgcgccgcaagcggattcactttctcctcctatgccatgagctgggtccgccaagcccccggaaagggactggaatgggtgtccgccatctcggggtctggaggctcaacttactacgctgactccgtgaagggacggttcaccattagccgcgacaactccaagaacaccctctacctccaaatgaactccctgcgggccgaggataccgccgtctactactgcgccaaagtggaaggttcaggatcgctggactactggggacagggtactctcgtgaccgtgtcatcgggcggaggaggttccggcggtggcggctccggcggcggagggtcggagatcgtgatgacccagagccctggtactctgagcctttcgccgggagaaagggccaccctgtcctgccgcgcttcccaatccgtgtcctccgcgtacttggcgtggtaccagcagaagccgggacagccccctcggctgctgatcagcggggccagcacccgggcaaccggaatcccagacagattcgggggttccggcagcggcacagatttcaccctgactatttcgaggttggagcccgaggactttgcggtgtattactgtcagcactacgggtcgtcctttaatggctccagcctgttcacgttcggacaggggacccgcctggaaatcaagaccactaccccagcaccgaggccacccaccccggctcctaccatcgcctcccagcctctgtccctgcgtccggaggcatgtagacccgcagctggtggggccgtgcatacccggggtcttgacttcgcctgcgatatctacatttgggcccctctggctggtacttgcggggtcctgctgctttcactcgtgatcactctttactgtaagcgcggtcggaagaagctgctgtacatctttaagcaacccttcatgaggcctgtgcagactactcaagaggaggacggctgttcatgccggttcccagaggaggaggaaggcggctgcgaactgcgcgtgaaattcagccgcagcgcagatgctccagcctacaagcaggggcagaaccagctctacaacgaactcaatcttggtcggagagaggagtacgacgtgctggacaagcggagaggacgggacccagaaatgggcgggaagccgcgcagaaagaatccccaagagggcctgtacaacgagctccaaaaggataagatggcagaagcctatagcgagattggtatgaaaggggaacgcagaagaggcaaaggccacgacggactgtaccagggactcagcaccgccaccaaggacacctatgacgctcttcacatgcaggccctgccgcctcgg

SEQ ID NO: 274 - protein, 241 aa, Artificial Sequence
  Description of Artificial Sequence: Synthetic polypeptide
EVQLVETGGGLVQPGGSLRLSCAASGITFSRYPMSWVRQAPGKGLEWVSGISDSGVSTYYADSAKGRFTISRDNSKNTLFLQMSSLRDEDTAVYYCVTRAGSEASDIWGQGTMVTVSSGGGGSGGGGSGGGGSEIVLTQSPATLSLSPGERATLSCRASQSVSNSLAWYQQKPGQAPRLLIYDASSRATGIPDRFSGSGSGTDFTLTISRLEPEDFAIYYCQQFGTSSGLTFGGGTKLEIK

SEQ ID NO: 275 - DNA, 723 bp, Artificial Sequence
  Description of Artificial Sequence: Synthetic polynucleotide
gaagtgcaactggtggaaaccggtggcggcctggtgcagcctggaggatcattgaggctgtcatgcgcggccagcggtattaccttctcccggtaccccatgtcctgggtcagacaggccccggggaaagggcttgaatgggtgtccgggatctcggactccggtgtcagcacttactacgccgactccgccaagggacgcttcaccatttcccgggacaactcgaagaacaccctgttcctccaaatgagctccctccgggacgaggatactgcagtgtactactgcgtgacccgcgccgggtccgaggcgtctgacatttggggacagggcactatggtcaccgtgtcgtccggcggagggggctcgggaggcggtggcagcggaggaggagggtccgagatcgtgctgacccaatccccggccaccctctcgctgagccctggagaaagggcaaccttgtcctgtcgcgcgagccagtccgtgagcaactccctggcctggtaccagcagaagcccggacaggctccgagacttctgatctacgacgcttcgagccgggccactggaatccccgaccgcttttcggggtccggctcaggaaccgatttcaccctgacaatctcacggctggagccagaggatttcgccatctattactgccagcagttcggtacttcctccggcctgactttcggaggcggcacgaagctcgaaatcaag

SEQ ID NO: 276 - protein, 118 aa, Artificial Sequence
  Description of Artificial Sequence: Synthetic polypeptide
EVQLVETGGGLVQPGGSLRLSCAASGITFSRYPMSWVRQAPGKGLEWVSGISDSGVSTYYADSAKGRFTISRDNSKNTLFLQMSSLRDEDTAVYYCVTRAGSEASDIWGQGTMVTVSS

SEQ ID NO: 277 - protein, 108 aa, Artificial Sequence
  Description of Artificial Sequence: Synthetic polypeptide
EIVLTQSPATLSLSPGERATLSCRASQSVSNSLAWYQQKPGQAPRLLIYDASSRATGIPDRFSGSGSGTDFTLTISRLEPEDFAIYYCQQFGTSSGLTFGGGTKLEIK

SEQ ID NO: 278 - protein, 485 aa, Artificial Sequence
  Description of Artificial Sequence: Synthetic polypeptide
MALPVTALLLPLALLLHAARPEVQLVETGGGLVQPGGSLRLSCAASGITFSRYPMSWVRQAPGKGLEWVSGISDSGVSTYYADSAKGRFTISRDNSKNTLFLQMSSLRDEDTAVYYCVTRAGSEASDIWGQGTMVTVSSGGGGSGGGGSGGGGSEIVLTQSPATLSLSPGERATLSCRASQSVSNSLAWYQQKPGQAPRLLIYDASSRATGIPDRFSGSGSGTDFTLTISRLEPEDFAIYYCQQFGTSSGLTFGGGTKLEIKTTTPAPRPPTPAPTIASQPLSLRPEACRPAAGGAVHTRGLDFACDIYIWAPLAGTCGVLLLSLVITLYCKRGRKKLLYIFKQPFMRPVQTTQEEDGCSCRFPEEEEGGCELRVKFSRSADAPAYKQGQNQLYNELNLGRREEYDVLDKRRGRDPEMGGKPRRKNPQEGLYNELQKDKMAEAYSEIGMKGERRRGKGHDGLYQGLSTATKDTYDALHMQALPPR

SEQ ID NO: 279 - DNA, 1455 bp, Artificial Sequence
  Description of Artificial Sequence: Synthetic polynucleotide
atggccctccctgtcaccgccctgctgcttccgctggctcttctgctccacgccgctcggcccgaagtgcaactggtggaaaccggtggcggcctggtgcagcctggaggatcattgaggctgtcatgcgcggccagcggtattaccttctcccggtaccccatgtcctgggtcagacaggccccggggaaagggcttgaatgggtgtccgggatctcggactccggtgtcagcacttactacgccgactccgccaagggacgcttcaccatttcccgggacaactcgaagaacaccctgttcctccaaatgagctccctccgggacgaggatactgcagtgtactactgcgtgacccgcgccgggtccgaggcgtctgacatttggggacagggcactatggtcaccgtgtcgtccggcggagggggctcgggaggcggtggcagcggaggaggagggtccgagatcgtgctgacccaatccccggccaccctctcgctgagccctggagaaagggcaaccttgtcctgtcgcgcgagccagtccgtgagcaactccctggcctggtaccagcagaagcccggacaggctccgagacttctgatctacgacgcttcgagccgggccactggaatccccgaccgcttttcggggtccggctcaggaaccgatttcaccctgacaatctcacggctggagccagaggatttcgccatctattactgccagcagttcggtacttcctccggcctgactttcggaggcggcacgaagctcgaaatcaagaccactaccccagcaccgaggccacccaccccggctcctaccatcgcctcccagcctctgtccctgcgtccggaggcatgtagacccgcagctggtggggccgtgcatacccggggtcttgacttcgcctgcgatatctacatttgggcccctctggctggtacttgcggggtcctgctgctttcactcgtgatcactctttactgtaagcgcggtcggaagaagctgctgtacatctttaagcaacccttcatgaggcctgtgcagactactcaagaggaggacggctgttcatgccggttcccagaggaggaggaaggcggctgcgaactgcgcgtgaaattcagccgcagcgcagatgctccagcctacaagcaggggcagaaccagctctacaacgaactcaatcttggtcggagagaggagtacgacgtgctggacaagcggagaggacgggacccagaaatgggcgggaagccgcgcagaaagaatccccaagagggcctgtacaacgagctccaaaaggataagatggcagaagcctatagcgagattggtatgaaaggggaacgcagaagaggcaaaggccacgacggactgtaccagggactcagcaccgccaccaaggacacctatgacgctcttcacatgcaggccctgccgcctcgg

SEQ ID NO: 280 - protein, 248 aa, Artificial Sequence
  Description of Artificial Sequence: Synthetic polypeptide
QVQLVESGGGLVQPGGSLRLSCAASGFTFSSYAMSWVRQAPGKGLEWVSAISGSGGSTYYADSVKGRFTISRDNAKNSLYLQMNSLRAEDTAIYYCARATYKRELRYYYGMDVWGQGTMVTVSSGGGGSGGGGSGGGGSEIVMTQSPGTVSLSPGERATLSCRASQSVSSSFLAWYQQKPGQAPRLLIYGASSRATGIPDRFSGSGSGTDFTLTISRLEPEDSAVYYCQQYHSSPSWTFGQGTRLEIK

SEQ ID NO: 281 - DNA, 744 bp, Artificial Sequence
  Description of Artificial Sequence: Synthetic polynucleotide
caagtgcagctcgtggaatcgggtggcggactggtgcagccggggggctcacttagactgtcctgcgcggccagcggattcactttctcctcctacgccatgtcctgggtcagacaggcccctggaaagggcctggaatgggtgtccgcaatcagcggcagcggcggctcgacctattacgcggattcagtgaagggcagattcaccatttcccgggacaacgccaagaactccttgtaccttcaaatgaactccctccgcgcggaagataccgcaatctactactgcgctcgggccacttacaagagggaactgcgctactactacgggatggacgtctggggccagggaaccatggtcaccgtgtccagcggaggaggaggatcgggaggaggcggtagcgggggtggagggtcggagatcgtgatgacccagtcccccggcactgtgtcgctgtcccccggcgaacgggccaccctgtcatgtcgggccagccagtcagtgtcgtcaagcttcctcgcctggtaccagcagaaaccgggacaagctccccgcctgctgatctacggagccagcagccgggccaccggtattcctgaccggttctccggttcggggtccgggaccgactttactctgactatctctcgcctcgagccagaggactccgccgtgtattactgccagcagtaccactcctccccgtcctggacgttcggacagggcacaaggctggagattaag

SEQ ID NO: 282 - protein, 124 aa, Artificial Sequence
  Description of Artificial Sequence: Synthetic polypeptide
QVQLVESGGGLVQPGGSLRLSCAASGFTFSSYAMSWVRQAPGKGLEWVSAISGSGGSTYYADSVKGRFTISRDNAKNSLYLQMNSLRAEDTAIYYCARATYKRELRYYYGMDVWGQGTMVTVSS

SEQ ID NO: 283 - protein, 109 aa, Artificial Sequence
  Description of Artificial Sequence: Synthetic polypeptide
EIVMTQSPGTVSLSPGERATLSCRASQSVSSSFLAWYQQKPGQAPRLLIYGASSRATGIPDRFSGSGSGTDFTLTISRLEPEDSAVYYCQQYHSSPSWTFGQGTRLEIK

SEQ ID NO: 284 - protein, 492 aa, Artificial Sequence
  Description of Artificial Sequence: Synthetic polypeptide
MALPVTALLLPLALLLHAARPQVQLVESGGGLVQPGGSLRLSCAASGFTFSSYAMSWVRQAPGKGLEWVSAISGSGGSTYYADSVKGRFTISRDNAKNSLYLQMNSLRAEDTAIYYCARATYKRELRYYYGMDVWGQGTMVTVSSGGGGSGGGGSGGGGSEIVMTQSPGTVSLSPGERATLSCRASQSVSSSFLAWYQQKPGQAPRLLIYGASSRATGIPDRFSGSGSGTDFTLTISRLEPEDSAVYYCQQYHSSPSWTFGQGTRLEIKTTTPAPRPPTPAPTIASQPLSLRPEACRPAAGGAVHTRGLDFACDIYIWAPLAGTCGVLLLSLVITLYCKRGRKKLLYIFKQPFMRPVQTTQEEDGCSCRFPEEEEGGCELRVKFSRSADAPAYKQGQNQLYNELNLGRREEYDVLDKRRGRDPEMGGKPRRKNPQEGLYNELQKDKMAEAYSEIGMKGERRRGKGHDGLYQGLSTATKDTYDALHMQALPPR

SEQ ID NO: 285 - DNA, 1476 bp, Artificial Sequence
  Description of Artificial Sequence: Synthetic polynucleotide
atggccctccctgtcaccgccctgctgcttccgctggctcttctgctccacgccgctcggccccaagtgcagctcgtggaatcgggtggcggactggtgcagccggggggctcacttagactgtcctgcgcggccagcggattcactttctcctcctacgccatgtcctgggtcagacaggcccctggaaagggcctggaatgggtgtccgcaatcagcggcagcggcggctcgacctattacgcggattcagtgaagggcagattcaccatttcccgggacaacgccaagaactccttgtaccttcaaatgaactccctccgcgcggaagataccgcaatctactactgcgctcgggccacttacaagagggaactgcgctactactacgggatggacgtctggggccagggaaccatggtcaccgtgtccagcggaggaggaggatcgggaggaggcggtagcgggggtggagggtcggagatcgtgatgacccagtcccccggcactgtgtcgctgtcccccggcgaacgggccaccctgtcatgtcgggccagccagtcagtgtcgtcaagcttcctcgcctggtaccagcagaaaccgggacaagctccccgcctgctgatctacggagccagcagccgggccaccggtattcctgaccggttctccggttcggggtccgggaccgactttactctgactatctctcgcctcgagccagaggactccgccgtgtattactgccagcagtaccactcctccccgtcctggacgttcggacagggcacaaggctggagattaagaccactaccccagcaccgaggccacccaccccggctcctaccatcgcctcccagcctctgtccctgcgtccggaggcatgtagacccgcagctggtggggccgtgcatacccggggtcttgacttcgcctgcgatatctacatttgggcccctctggctggtacttgcggggtcctgctgctttcactcgtgatcactctttactgtaagcgcggtcggaagaagctgctgtacatctttaagcaacccttcatgaggcctgtgcagactactcaagaggaggacggctgttcatgccggttcccagaggaggaggaaggcggctgcgaactgcgcgtgaaattcagccgcagcgcagatgctccagcctacaagcaggggcagaaccagctctacaacgaactcaatcttggtcggagagaggagtacgacgtgctggacaagcggagaggacgggacccagaaatgggcgggaagccgcgcagaaagaatccccaagagggcctgtacaacgagctccaaaaggataagatggcagaagcctatagcgagattggtatgaaaggggaacgcagaagaggcaaaggccacgacggactgtaccagggactcagcaccgccaccaaggacacctatgacgctcttcacatgcaggccctgccgcctcgg

SEQ ID NO: 286 - protein, 248 aa, Artificial Sequence
  Description of Artificial Sequence: Synthetic polypeptide
EVQLVETGGGLVQPGGSLRLSCAASGFTFSSYAMSWVRQAPGKGLEWVSAISGSGGSTYYADSVKGRFTISRDNSKNTLYLQMNTLKAEDTAVYYCARATYKRELRYYYGMDVWGQGTTVTVSSGGGGSGGGGSGGGGSEIVLTQSPSTLSLSPGESATLSCRASQSVSTTFLAWYQQKPGQAPRLLIYGSSNRATGIPDRFSGSGSGTDFTLTIRRLEPEDFAVYYCQQYHSSPSWTFGQGTKVEIK

SEQ ID NO: 287 - DNA, 744 bp, Artificial Sequence
  Description of Artificial Sequence: Synthetic polynucleotide
gaggtgcagcttgtggaaaccggtggcggactggtgcagcccggaggaagcctcaggctgtcctgcgccgcgtccggcttcaccttctcctcgtacgccatgtcctgggtccgccaggcccccggaaagggcctggaatgggtgtccgccatctctggaagcggaggttccacgtactacgcggacagcgtcaagggaaggttcacaatctcccgcgataattcgaagaacactctgtaccttcaaatgaacaccctgaaggccgaggacactgctgtgtactactgcgcacgggccacctacaagagagagctccggtactactacggaatggacgtctggggccagggaactactgtgaccgtgtcctcgggagggggtggctccggggggggcggctccggcggaggcggttccgagattgtgctgacccagtcaccttcaactctgtcgctgtccccgggagagagcgctactctgagctgccgggccagccagtccgtgtccaccaccttcctcgcctggtatcagcagaagccggggcaggcaccacggctcttgatctacgggtcaagcaacagagcgaccggaattcctgaccgcttctcggggagcggttcaggcaccgacttcaccctgactatccggcgcctggaacccgaagatttcgccgtgtattactgtcaacagtaccactcctcgccgtcctggacctttggccaaggaaccaaagtggaaatcaag

SEQ ID NO: 288 - protein, 124 aa, Artificial Sequence
  Description of Artificial Sequence: Synthetic polypeptide
EVQLVETGGGLVQPGGSLRLSCAASGFTFSSYAMSWVRQAPGKGLEWVSAISGSGGSTYYADSVKGRFTISRDNSKNTLYLQMNTLKAEDTAVYYCARATYKRELRYYYGMDVWGQGTTVTVSS

SEQ ID NO: 289 - protein, 109 aa, Artificial Sequence
  Description of Artificial Sequence: Synthetic polypeptide
EIVLTQSPSTLSLSPGESATLSCRASQSVSTTFLAWYQQKPGQAPRLLIYGSSNRATGIPDRFSGSGSGTDFTLTIRRLEPEDFAVYYCQQYHSSPSWTFGQGTKVEIK

SEQ ID NO: 290 - protein, 492 aa, Artificial Sequence
  Description of Artificial Sequence: Synthetic polypeptide
MALPVTALLLPLALLLHAARPEVQLVETGGGLVQPGGSLRLSCAASGFTFSSYAMSWVRQAPGKGLEWVSAISGSGGSTYYADSVKGRFTISRDNSKNTLYLQMNTLKAEDTAVYYCARATYKRELRYYYGMDVWGQGTTVTVSSGGGGSGGGGSGGGGSEIVLTQSPSTLSLSPGESATLSCRASQSVSTTFLAWYQQKPGQAPRLLIYGSSNRATGIPDRFSGSGSGTDFTLTIRRLEPEDFAVYYCQQYHSSPSWTFGQGTKVEIKTTTPAPRPPTPAPTIASQPLSLRPEACRPAAGGAVHTRGLDFACDIYIWAPLAGTCGVLLLSLVITLYCKRGRKKLLYIFKQPFMRPVQTTQEEDGCSCRFPEEEEGGCELRVKFSRSADAPAYKQGQNQLYNELNLGRREEYDVLDKRRGRDPEMGGKPRRKNPQEGLYNELQKDKMAEAYSEIGMKGERRRGKGHDGLYQGLSTATKDTYDALHMQALPPR

SEQ ID NO: 291 - DNA, 1476 bp, Artificial Sequence
  Description of Artificial Sequence: Synthetic polynucleotide
atggccctccctgtcaccgccctgctgcttccgctggctcttctgctccacgccgctcggcccgaggtgcagcttgtggaaaccggtggcggactggtgcagcccggaggaagcctcaggctgtcctgcgccgcgtccggcttcaccttctcctcgtacgccatgtcctgggtccgccaggcccccggaaagggcctggaatgggtgtccgccatctctggaagcggaggttccacgtactacgcggacagcgtcaagggaaggttcacaatctcccgcgataattcgaagaacactctgtaccttcaaatgaacaccctgaaggccgaggacactgctgtgtactactgcgcacgggccacctacaagagagagctccggtactactacggaatggacgtctggggccagggaactactgtgaccgtgtcctcgggagggggtggctccggggggggcggctccggcggaggcggttccgagattgtgctgacccagtcaccttcaactctgtcgctgtccccgggagagagcgctactctgagctgccgggccagccagtccgtgtccaccaccttcctcgcctggtatcagcagaagccggggcaggcaccacggctcttgatctacgggtcaagcaacagagcgaccggaattcctgaccgcttctcggggagcggttcaggcaccgacttcaccctgactatccggcgcctggaacccgaagatttcgccgtgtattactgtcaacagtaccactcctcgccgtcctggacctttggccaaggaaccaaagtggaaatcaagaccactaccccagcaccgaggccacccaccccggctcctaccatcgcctcccagcctctgtccctgcgtccggaggcatgtagacccgcagctggtggggccgtgcatacccggggtcttgacttcgcctgcgatatctacatttgggcccctctggctggtacttgcggggtcctgctgctttcactcgtgatcactctttactgtaagcgcggtcggaagaagctgctgtacatctttaagcaacccttcatgaggcctgtgcagactactcaagaggaggacggctgttcatgccggttcccagaggaggaggaaggcggctgcgaactgcgcgtgaaattcagccgcagcgcagatgctccagcctacaagcaggggcagaaccagctctacaacgaactcaatcttggtcggagagaggagtacgacgtgctggacaagcggagaggacgggacccagaaatgggcgggaagccgcgcagaaagaatccccaagagggcctgtacaacgagctccaaaaggataagatggcagaagcctatagcgagattggtatgaaaggggaacgcagaagaggcaaaggccacgacggactgtaccagggactcagcaccgccaccaaggacacctatgacgctcttcacatgcaggccctgccgcctcgg

SEQ ID NO: 292 - protein, 239 aa, Artificial Sequence
  Description of Artificial Sequence: Synthetic polypeptide
EVQLVETGGGLVQPGRSLRLSCAASGFTFDDYAMHWVRQAPGKGLEWVSGISWNSGSIGYADSVKGRFTISRDNAKNSLYLQMNSLRDEDTAVYYCARVGKAVPDVWGQGTTVTVSSGGGGSGGGGSGGGGSDIVMTQTPSSLSASVGDRVTITCRASQSISSYLNWYQQKPGKAPKLLIYAASSLQSGVPSRFSGSGSGTDFTLTISSLQPEDFATYYCQQSYSTPYSFGQGTRLEIK

SEQ ID NO: 293 - DNA, 717 bp, Artificial Sequence
  Description of Artificial Sequence: Synthetic polynucleotide
gaagtgcagctcgtggaaactggaggtggactcgtgcagcctggacggtcgctgcggctgagctgcgctgcatccggcttcaccttcgacgattatgccatgcactgggtcagacaggcgccagggaagggacttgagtgggtgtccggtatcagctggaatagcggctcaatcggatacgcggactccgtgaagggaaggttcaccatttcccgcgacaacgccaagaactccctgtacttgcaaatgaacagcctccgggatgaggacactgccgtgtactactgcgcccgcgtcggaaaagctgtgcccgacgtctggggccagggaaccactgtgaccgtgtccagcggcgggggtggatcgggcggtggagggtccggtggagggggctcagatattgtgatgacccagaccccctcgtccctgtccgcctcggtcggcgaccgcgtgactatcacatgtagagcctcgcagagcatctccagctacctgaactggtatcagcagaagccggggaaggccccgaagctcctgatctacgcggcatcatcactgcaatcgggagtgccgagccggttttccgggtccggctccggcaccgacttcacgctgaccatttcttccctgcaacccgaggacttcgccacttactactgccagcagtcctactccaccccttactccttcggccaaggaaccaggctggaaatcaag

SEQ ID NO: 294 - protein, 117 aa, Artificial Sequence
  Description of Artificial Sequence: Synthetic polypeptide
EVQLVETGGGLVQPGRSLRLSCAASGFTFDDYAMHWVRQAPGKGLEWVSGISWNSGSIGYADSVKGRFTISRDNAKNSLYLQMNSLRDEDTAVYYCARVGKAVPDVWGQGTTVTVSS

SEQ ID NO: 295 - protein, 107 aa, Artificial Sequence
  Description of Artificial Sequence: Synthetic polypeptide
DIVMTQTPSSLSASVGDRVTITCRASQSISSYLNWYQQKPGKAPKLLIYAASSLQSGVPSRFSGSGSGTDFTLTISSLQPEDFATYYCQQSYSTPYSFGQGTRLEIK

SEQ ID NO: 296 - protein, 483 aa, Artificial Sequence
  Description of Artificial Sequence: Synthetic polypeptide
MALPVTALLLPLALLLHAARPEVQLVETGGGLVQPGRSLRLSCAASGFTFDDYAMHWVRQAPGKGLEWVSGISWNSGSIGYADSVKGRFTISRDNAKNSLYLQMNSLRDEDTAVYYCARVGKAVPDVWGQGTTVTVSSGGGGSGGGGSGGGGSDIVMTQTPSSLSASVGDRVTITCRASQSISSYLNWYQQKPGKAPKLLIYAASSLQSGVPSRFSGSGSGTDFTLTISSLQPEDFATYYCQQSYSTPYSFGQGTRLEIKTTTPAPRPPTPAPTIASQPLSLRPEACRPAAGGAVHTRGLDFACDIYIWAPLAGTCGVLLLSLVITLYCKRGRKKLLYIFKQPFMRPVQTTQEEDGCSCRFPEEEEGGCELRVKFSRSADAPAYKQGQNQLYNELNLGRREEYDVLDKRRGRDPEMGGKPRRKNPQEGLYNELQKDKMAEAYSEIGMKGERRRGKGHDGLYQGLSTATKDTYDALHMQALPPR

SEQ ID NO: 297 - DNA, 1449 bp, Artificial Sequence
  Description of Artificial Sequence: Synthetic polynucleotide
atggccctccctgtcaccgccctgctgcttccgctggctcttctgctccacgccgctcggcccgaagtgcagctcgtggaaactggaggtggactcgtgcagcctggacggtcgctgcggctgagctgcgctgcatccggcttcaccttcgacgattatgccatgcactgggtcagacaggcgccagggaagggacttgagtgggtgtccggtatcagctggaatagcggctcaatcggatacgcggactccgtgaagggaaggttcaccatttcccgcgacaacgccaagaactccctgtacttgcaaatgaacagcctccgggatgaggacactgccgtgtactactgcgcccgcgtcggaaaagctgtgcccgacgtctggggccagggaaccactgtgaccgtgtccagcggcgggggtggatcgggcggtggagggtccggtggagggggctcagatattgtgatgacccagaccccctcgtccctgtccgcctcggtcggcgaccgcgtgactatcacatgtagagcctcgcagagcatctccagctacctgaactggtatcagcagaagccggggaaggccccgaagctcctgatctacgcggcatcatcactgcaatcgggagtgccgagccggttttccgggtccggctccggcaccgacttcacgctgaccatttcttccctgcaacccgaggacttcgccacttactactgccagcagtcctactccaccccttactccttcggccaaggaaccaggctggaaatcaagaccactaccccagcaccgaggccacccaccccggctcctaccatcgcctcccagcctctgtccctgcgtccggaggcatgtagacccgcagctggtggggccgtgcatacccggggtcttgacttcgcctgcgatatctacatttgggcccctctggctggtacttgcggggtcctgctgctttcactcgtgatcactctttactgtaagcgcggtcggaagaagctgctgtacatctttaagcaacccttcatgaggcctgtgcagactactcaagaggaggacggctgttcatgccggttcccagaggaggaggaaggcggctgcgaactgcgcgtgaaattcagccgcagcgcagatgctccagcctacaagcaggggcagaaccagctctacaacgaactcaatcttggtcggagagaggagtacgacgtgctggacaagcggagaggacgggacccagaaatgggcgggaagccgcgcagaaagaatccccaagagggcctgtacaacgagctccaaaaggataagatggcagaagcctatagcgagattggtatgaaaggggaacgcagaagaggcaaaggccacgacggactgtaccagggactcagcaccgccaccaaggacacctatgacgctcttcacatgcaggccctgccgcctcgg

SEQ ID NO: 298 - protein, 246 aa, Artificial Sequence
  Description of Artificial Sequence: Synthetic polypeptide
EVQLVESGGGLVQPGRSLRLSCTASGFTFDDYAMHWVRQRPGKGLEWVASINWKGNSLAYGDSVKGRFAISRDNAKNTVFLQMNSLRTEDTAVYYCASHQGVAYYNYAMDVWGRGTLVTVSSGGGGSGGGGSGGGGSEIVLTQSPGTLSLSPGERATLSCRATQSIGSSFLAWYQQRPGQAPRLLIYGASQRATGIPDRFSGRGSGTDFTLTISRVEPEDSAVYYCQHYESSPSWTFGQGTKVEIK

SEQ ID NO: 299 - DNA, 738 bp, Artificial Sequence
  Description of Artificial Sequence: Synthetic polynucleotide
gaagtgcagctcgtggagagcgggggaggattggtgcagcccggaaggtccctgcggctctcctgcactgcgtctggcttcaccttcgacgactacgcgatgcactgggtcagacagcgcccgggaaagggcctggaatgggtcgcctcaatcaactggaagggaaactccctggcctatggcgacagcgtgaagggccgcttcgccatttcgcgcgacaacgccaagaacaccgtgtttctgcaaatgaattccctgcggaccgaggataccgctgtgtactactgcgccagccaccagggcgtggcatactataactacgccatggacgtgtggggaagagggacgctcgtcaccgtgtcctccgggggcggtggatcgggtggaggaggaagcggtggcgggggcagcgaaatcgtgctgactcagagcccgggaactctttcactgtccccgggagaacgggccactctctcgtgccgggccacccagtccatcggctcctccttccttgcctggtaccagcagaggccaggacaggcgccccgcctgctgatctacggtgcttcccaacgcgccactggcattcctgaccggttcagcggcagagggtcgggaaccgatttcacactgaccatttcccgggtggagcccgaagattcggcagtctactactgtcagcattacgagtcctccccttcatggaccttcggtcaagggaccaaagtggagatcaag

SEQ ID NO: 300 - protein, 122 aa, Artificial Sequence
  Description of Artificial Sequence: Synthetic polypeptide
EVQLVESGGGLVQPGRSLRLSCTASGFTFDDYAMHWVRQRPGKGLEWVASINWKGNSLAYGDSVKGRFAISRDNAKNTVFLQMNSLRTEDTAVYYCASHQGVAYYNYAMDVWGRGTLVTVSS

SEQ ID NO: 301 - protein, 109 aa, Artificial Sequence
  Description of Artificial Sequence: Synthetic polypeptide
EIVLTQSPGTLSLSPGERATLSCRATQSIGSSFLAWYQQRPGQAPRLLIYGASQRATGIPDRFSGRGSGTDFTLTISRVEPEDSAVYYCQHYESSPSWTFGQGTKVEIK

SEQ ID NO: 302 - protein, 490 aa, Artificial Sequence
  Description of Artificial Sequence: Synthetic polypeptide
MALPVTALLLPLALLLHAARPEVQLVESGGGLVQPGRSLRLSCTASGFTFDDYAMHWVRQRPGKGLEWVASINWKGNSLAYGDSVKGRFAISRDNAKNTVFLQMNSLRTEDTAVYYCASHQGVAYYNYAMDVWGRGTLVTVSSGGGGSGGGGSGGGGSEIVLTQSPGTLSLSPGERATLSCRATQSIGSSFLAWYQQRPGQAPRLLIYGASQRATGIPDRFSGRGSGTDFTLTISRVEPEDSAVYYCQHYESSPSWTFGQGTKVEIKTTTPAPRPPTPAPTIASQPLSLRPEACRPAAGGAVHTRGLDFACDIYIWAPLAGTCGVLLLSLVITLYCKRGRKKLLYIFKQPFMRPVQTTQEEDGCSCRFPEEEEGGCELRVKFSRSADAPAYKQGQNQLYNELNLGRREEYDVLDKRRGRDPEMGGKPRRKNPQEGLYNELQKDKMAEAYSEIGMKGERRRGKGHDGLYQGLSTATKDTYDALHMQALPPR

SEQ ID NO: 303 - DNA, 1470 bp, Artificial Sequence
  Description of Artificial Sequence: Synthetic polynucleotide
atggccctccctgtcaccgccctgctgcttccgctggctcttctgctccacgccgctcggcccgaagtgcagctcgtggagagcgggggaggattggtgcagcccggaaggtccctgcggctctcctgcactgcgtctggcttcaccttcgacgactacgcgatgcactgggtcagacagcgcccgggaaagggcctggaatgggtcgcctcaatcaactggaagggaaactccctggcctatggcgacagcgtgaagggccgcttcgccatttcgcgcgacaacgccaagaacaccgtgtttctgcaaatgaattccctgcggaccgaggataccgctgtgtactactgcgccagccaccagggcgtggcatactataactacgccatggacgtgtggggaagagggacgctcgtcaccgtgtcctccgggggcggtggatcgggtggaggaggaagcggtggcgggggcagcgaaatcgtgctgactcagagcccgggaactctttcactgtccccgggagaacgggccactctctcgtgccgggccacccagtccatcggctcctccttccttgcctggtaccagcagaggccaggacaggcgccccgcctgctgatctacggtgcttcccaacgcgccactggcattcctgaccggttcagcggcagagggtcgggaaccgatttcacactgaccatttcccgggtggagcccgaagattcggcagtctactactgtcagcattacgagtcctccccttcatggaccttcggtcaagggaccaaagtggagatcaagaccactaccccagcaccgaggccacccaccccggctcctaccatcgcctcccagcctctgtccctgcgtccggaggcatgtagacccgcagctggtggggccgtgcatacccggggtcttgacttcgcctgcgatatctacatttgggcccctctggctggtacttgcggggtcctgctgctttcactcgtgatcactctttactgtaagcgcggtcggaagaagctgctgtacatctttaagcaacccttcatgaggcctgtgcagactactcaagaggaggacggctgttcatgccggttcccagaggaggaggaaggcggctgcgaactgcgcgtgaaattcagccgcagcgcagatgctccagcctacaagcaggggcagaaccagctctacaacgaactcaatcttggtcggagagaggagtacgacgtgctggacaagcggagaggacgggacccagaaatgggcgggaagccgcgcagaaagaatccccaagagggcctgtacaacgagctccaaaaggataagatggcagaagcctatagcgagattggtatgaaaggggaacgcagaagaggcaaaggccacgacggactgtaccagggactcagcaccgccaccaaggacacctatgacgctcttcacatgcaggccctgccgcctcgg

SEQ ID NO: 304 - protein, 241 aa, Artificial Sequence
  Description of Artificial Sequence: Synthetic polypeptide
EVQLVESGGGLVQPGGSLRLSCAASGFTFSSYAMSWVRQAPGKGLEWVSAISGSGGSTYYADSVKGRFTISRDNSKNTLYLQMNSLRAEDTAVYYCAKVVRDGMDVWGQGTTVTVSSGGGGSGGGGSGGGGSEIVLTQSPATLSLSPGERATLSCRASQSVSSSYLAWYQQKPGQAPRLLIYGASSRATGIPDRFSGNGSGTDFTLTISRLEPEDFAVYYCQQYGSPPRFTFGPGTKVDIK

SEQ ID NO: 305 - DNA, 723 bp, Artificial Sequence
  Description of Artificial Sequence: Synthetic polynucleotide
gaggtgcagttggtcgaaagcgggggcgggcttgtgcagcctggcggatcactgcggctgtcctgcgcggcatcaggcttcacgttttcttcctacgccatgtcctgggtgcgccaggcccctggaaagggactggaatgggtgtccgcgatttcggggtccggcgggagcacctactacgccgattccgtgaagggccgcttcactatctcgcgggacaactccaagaacaccctctacctccaaatgaatagcctgcgggccgaggataccgccgtctactattgcgctaaggtcgtgcgcgacggaatggacgtgtggggacagggtaccaccgtgacagtgtcctcggggggaggcggtagcggcggaggaggaagcggtggtggaggttccgagattgtgctgactcaatcacccgcgaccctgagcctgtcccccggcgaaagggccactctgtcctgtcgggccagccaatcagtctcctcctcgtacctggcctggtaccagcagaagccaggacaggctccgagactccttatctatggcgcatcctcccgcgccaccggaatcccggataggttctcgggaaacggatcggggaccgacttcactctcaccatctcccggctggaaccggaggacttcgccgtgtactactgccagcagtacggcagcccgcctagattcactttcggccccggcaccaaagtggacatcaag

SEQ ID NO: 306 - protein, 117 aa, Artificial Sequence
  Description of Artificial Sequence: Synthetic polypeptide
EVQLVESGGGLVQPGGSLRLSCAASGFTFSSYAMSWVRQAPGKGLEWVSAISGSGGSTYYADSVKGRFTISRDNSKNTLYLQMNSLRAEDTAVYYCAKVVRDGMDVWGQGTTVTVSS

SEQ ID NO: 307 - protein, 109 aa, Artificial Sequence
  Description of Artificial Sequence: Synthetic polypeptide
EIVLTQSPATLSLSPGERATLSCRASQSVSSSYLAWYQQKPGQAPRLLIYGASSRATGIPDRFSGNGSGTDFTLTISRLEPEDFAVYYCQQYGSPPRFTFGPGTKVDIK

SEQ ID NO: 308 - protein, 485 aa, Artificial Sequence
  Description of Artificial Sequence: Synthetic polypeptide
MALPVTALLLPLALLLHAARPEVQLVESGGGLVQPGGSLRLSCAASGFTFSSYAMSWVRQAPGKGLEWVSAISGSGGSTYYADSVKGRFTISRDNSKNTLYLQMNSLRAEDTAVYYCAKVVRDGMDVWGQGTTVTVSSGGGGSGGGGSGGGGSEIVLTQSPATLSLSPGERATLSCRASQSVSSSYLAWYQQKPGQAPRLLIYGASSRATGIPDRFSGNGSGTDFTLTISRLEPEDFAVYYCQQYGSPPRFTFGPGTKVDIKTTTPAPRPPTPAPTIASQPLSLRPEACRPAAGGAVHTRGLDFACDIYIWAPLAGTCGVLLLSLVITLYCKRGRKKLLYIFKQPFMRPVQTTQEEDGCSCRFPEEEEGGCELRVKFSRSADAPAYKQGQNQLYNELNLGRREEYDVLDKRRGRDPEMGGKPRRKNPQEGLYNELQKDKMAEAYSEIGMKGERRRGKGHDGLYQGLSTATKDTYDALHMQALPPR

SEQ ID NO: 309 - DNA, 1455 bp, Artificial Sequence
  Description of Artificial Sequence: Synthetic polynucleotide
atggccctccctgtcaccgccctgctgcttccgctggctcttctgctccacgccgctcggcccgaggtgcagttggtcgaaagcgggggcgggcttgtgcagcctggcggatcactgcggctgtcctgcgcggcatcaggcttcacgttttcttcctacgccatgtcctgggtgcgccaggcccctggaaagggactggaatgggtgtccgcgatttcggggtccggcgggagcacctactacgccgattccgtgaagggccgcttcactatctcgcgggacaactccaagaacaccctctacctccaaatgaatagcctgcgggccgaggataccgccgtctactattgcgctaaggtcgtgcgcgacggaatggacgtgtggggacagggtaccaccgtgacagtgtcctcggggggaggcggtagcggcggaggaggaagcggtggtggaggttccgagattgtgctgactcaatcacccgcgaccctgagcctgtcccccggcgaaagggccactctgtcctgtcgggccagccaatcagtctcctcctcgtacctggcctggtaccagcagaagccaggacaggctccgagactccttatctatggcgcatcctcccgcgccaccggaatcccggataggttctcgggaaacggatcggggaccgacttcactctcaccatctcccggctggaaccggaggacttcgccgtgtactactgccagcagtacggcagcccgcctagattcactttcggccccggcaccaaagtggacatcaagaccactaccccagcaccgaggccacccaccccggctcctaccatcgcctcccagcctctgtccctgcgtccggaggcatgtagacccgcagctggtggggccgtgcatacccggggtcttgacttcgcctgcgatatctacatttgggcccctctggctggtacttgcggggtcctgctgctttcactcgtgatcactctttactgtaagcgcggtcggaagaagctgctgtacatctttaagcaacccttcatgaggcctgtgcagactactcaagaggaggacggctgttcatgccggttcccagaggaggaggaaggcggctgcgaactgcgcgtgaaattcagccgcagcgcagatgctccagcctacaagcaggggcagaaccagctctacaacgaactcaatcttggtcggagagaggagtacgacgtgctggacaagcggagaggacgggacccagaaatgggcgggaagccgcgcagaaagaatccccaagagggcctgtacaacgagctccaaaaggataagatggcagaagcctatagcgagattggtatgaaaggggaacgcagaagaggcaaaggccacgacggactgtaccagggactcagcaccgccaccaaggacacctatgacgctcttcacatgcaggccctgccgcctcgg

SEQ ID NO: 310 - protein, 242 aa, Artificial Sequence
  Description of Artificial Sequence: Synthetic polypeptide
EVQLLESGGGLVQPGGSLRLSCAASGFTFSSYAMSWVRQAPGKGLEWVSAISGSGGSTYYADSVKGRFTISRDNSKNTLYLQMNSLRAEDTAVYYCAKIPQTGTFDYWGQGTLVTVSSGGGGSGGGGSGGGGSEIVLTQSPGTLSLSPGERATLSCRASQSVSSSYLAWYQQRPGQAPRLLIYGASSRATGIPDRFSGSGSGTDFTLTISRLEPEDFAVYYCQHYGSSPSWTFGQGTRLEIK

SEQ ID NO: 311 - DNA, 726 bp, Artificial Sequence
  Description of Artificial Sequence: Synthetic polynucleotide
gaagtgcagctgctggagtccggcggtggattggtgcaaccggggggatcgctcagactgtcctgtgcggcgtcaggcttcaccttctcgagctacgccatgtcatgggtcagacaggcccctggaaagggtctggaatgggtgtccgccatttccgggagcgggggatctacatactacgccgatagcgtgaagggccgcttcaccatttcccgggacaactccaagaacactctctatctgcaaatgaactccctccgcgctgaggacactgccgtgtactactgcgccaaaatccctcagaccggcaccttcgactactggggacaggggactctggtcaccgtcagcagcggtggcggaggttcggggggaggaggaagcggcggcggagggtccgagattgtgctgacccagtcacccggcactttgtccctgtcgcctggagaaagggccaccctttcctgccgggcatcccaatccgtgtcctcctcgtacctggcctggtaccagcagaggcccggacaggccccacggcttctgatctacggagcaagcagccgcgcgaccggtatcccggaccggttttcgggctcgggctcaggaactgacttcaccctcaccatctcccgcctggaacccgaagatttcgctgtgtattactgccagcactacggcagctccccgtcctggacgttcggccagggaactcggctggagatcaag

SEQ ID NO: 312 - protein, 118 aa, Artificial Sequence
  Description of Artificial Sequence: Synthetic polypeptide
EVQLLESGGGLVQPGGSLRLSCAASGFTFSSYAMSWVRQAPGKGLEWVSAISGSGGSTYYADSVKGRFTISRDNSKNTLYLQMNSLRAEDTAVYYCAKIPQTGTFDYWGQGTLVTVSS

SEQ ID NO: 313 - protein, 109 aa, Artificial Sequence
  Description of Artificial Sequence: Synthetic polypeptide
EIVLTQSPGTLSLSPGERATLSCRASQSVSSSYLAWYQQRPGQAPRLLIYGASSRATGIPDRFSGSGSGTDFTLTISRLEPEDFAVYYCQHYGSSPSWTFGQGTRLEIK

SEQ ID NO: 314 - protein, 486 aa, Artificial Sequence
  Description of Artificial Sequence: Synthetic polypeptide
MALPVTALLLPLALLLHAARPEVQLLESGGGLVQPGGSLRLSCAASGFTFSSYAMSWVRQAPGKGLEWVSAISGSGGSTYYADSVKGRFTISRDNSKNTLYLQMNSLRAEDTAVYYCAKIPQTGTFDYWGQGTLVTVSSGGGGSGGGGSGGGGSEIVLTQSPGTLSLSPGERATLSCRASQSVSSSYLAWYQQRPGQAPRLLIYGASSRATGIPDRFSGSGSGTDFTLTISRLEPEDFAVYYCQHYGSSPSWTFGQGTRLEIKTTTPAPRPPTPAPTIASQPLSLRPEACRPAAGGAVHTRGLDFACDIYIWAPLAGTCGVLLLSLVITLYCKRGRKKLLYIFKQPFMRPVQTTQEEDGCSCRFPEEEEGGCELRVKFSRSADAPAYKQGQNQLYNELNLGRREEYDVLDKRRGRDPEMGGKPRRKNPQEGLYNELQKDKMAEAYSEIGMKGERRRGKGHDGLYQGLSTATKDTYDALHMQALPPR

SEQ ID NO: 315 - DNA, 1458 bp, Artificial Sequence
  Description of Artificial Sequence: Synthetic polynucleotide
atggccctccctgtcaccgccctgctgcttccgctggctcttctgctccacgccgctcggcccgaagtgcagctgctggagtccggcggtggattggtgcaaccggggggatcgctcagactgtcctgtgcggcgtcaggcttcaccttctcgagctacgccatgtcatgggtcagacaggcccctggaaagggtctggaatgggtgtccgccatttccgggagcgggggatctacatactacgccgatagcgtgaagggccgcttcaccatttcccgggacaactccaagaacactctctatctgcaaatgaactccctccgcgctgaggacactgccgtgtactactgcgccaaaatccctcagaccggcaccttcgactactggggacaggggactctggtcaccgtcagcagcggtggcggaggttcggggggaggaggaagcggcggcggagggtccgagattgtgctgacccagtcacccggcactttgtccctgtcgcctggagaaagggccaccctttcctgccgggcatcccaatccgtgtcctcctcgtacctggcctggtaccagcagaggcccggacaggccccacggcttctgatctacggagcaagcagccgcgcgaccggtatcccggaccggttttcgggctcgggctcaggaactgacttcaccctcaccatctcccgcctggaacccgaagatttcgctgtgtattactgccagcactacggcagctccccgtcctggacgttcggccagggaactcggctggagatcaagaccactaccccagcaccgaggccacccaccccggctcctaccatcgcctcccagcctctgtccctgcgtccggaggcatgtagacccgcagctggtggggccgtgcatacccggggtcttgacttcgcctgcgatatctacatttgggcccctctggctggtacttgcggggtcctgctgctttcactcgtgatcactctttactgtaagcgcggtcggaagaagctgctgtacatctttaagcaacccttcatgaggcctgtgcagactactcaagaggaggacggctgttcatgccggttcccagaggaggaggaaggcggctgcgaactgcgcgtgaaattcagccgcagcgcagatgctccagcctacaagcaggggcagaaccagctctacaacgaactcaatcttggtcggagagaggagtacgacgtgctggacaagcggagaggacgggacccagaaatgggcgggaagccgcgcagaaagaatccccaagagggcctgtacaacgagctccaaaaggataagatggcagaagcctatagcgagattggtatgaaaggggaacgcagaagaggcaaaggccacgacggactgtaccagggactcagcaccgccaccaaggacacctatgacgctcttcacatgcaggccctgccgcctcgg

SEQ ID NO: 316 - protein, 248 aa, Artificial Sequence
  Description of Artificial Sequence: Synthetic polypeptide
EVQLVETGGGLVQPGGSLRLSCAASGFTFSSYAMSWVRQAPGKGLEWVSAISGSGGSTYYADSVKGRFTMSRENDKNSVFLQMNSLRVEDTGVYYCARANYKRELRYYYGMDVWGQGTMVTVSSGGGGSGGGGSGGGGSEIVMTQSPGTLSLSPGESATLSCRASQRVASNYLAWYQHKPGQAPSLLISGASSRATGVPDRFSGSGSGTDFTLAISRLEPEDSAVYYCQHYDSSPSWTFGQGTKVEIK

SEQ ID NO: 317 - DNA, 744 bp, Artificial Sequence
  Description of Artificial Sequence: Synthetic polynucleotide
gaagtgcaactggtggaaaccggtggaggactcgtgcagcctggcggcagcctccggctgagctgcgccgcttcgggattcaccttttcctcctacgcgatgtcttgggtcagacaggcccccggaaaggggctggaatgggtgtcagccatctccggctccggcggatcaacgtactacgccgactccgtgaaaggccggttcaccatgtcgcgcgagaatgacaagaactccgtgttcctgcaaatgaactccctgagggtggaggacaccggagtgtactattgtgcgcgcgccaactacaagagagagctgcggtactactacggaatggacgtctggggacagggaactatggtgaccgtgtcatccggtggagggggaagcggcggtggaggcagcgggggcgggggttcagaaattgtcatgacccagtccccgggaactctttccctctcccccggggaatccgcgactttgtcctgccgggccagccagcgcgtggcctcgaactacctcgcatggtaccagcataagccaggccaagccccttccctgctgatttccggggctagcagccgcgccactggcgtgccggataggttctcgggaagcggctcgggtaccgatttcaccctggcaatctcgcggctggaaccggaggattcggccgtgtactactgccagcactatgactcatccccctcctggacattcggacagggcaccaaggtcgagatcaag

SEQ ID NO: 318 - protein, 124 aa, Artificial Sequence
  Description of Artificial Sequence: Synthetic polypeptide
EVQLVETGGGLVQPGGSLRLSCAASGFTFSSYAMSWVRQAPGKGLEWVSAISGSGGSTYYADSVKGRFTMSRENDKNSVFLQMNSLRVEDTGVYYCARANYKRELRYYYGMDVWGQGTMVTVSS

SEQ ID NO: 319 - protein, 109 aa, Artificial Sequence
  Description of Artificial Sequence: Synthetic polypeptide
EIVMTQSPGTLSLSPGESATLSCRASQRVASNYLAWYQHKPGQAPSLLISGASSRATGVPDRFSGSGSGTDFTLAISRLEPEDSAVYYCQHYDSSPSWTFGQGTKVEIK

SEQ ID NO: 320 - protein, 492 aa, Artificial Sequence
  Description of Artificial Sequence: Synthetic polypeptide
MALPVTALLLPLALLLHAARPEVQLVETGGGLVQPGGSLRLSCAASGFTFSSYAMSWVRQAPGKGLEWVSAISGSGGSTYYADSVKGRFTMSRENDKNSVFLQMNSLRVEDTGVYYCARANYKRELRYYYGMDVWGQGTMVTVSSGGGGSGGGGSGGGGSEIVMTQSPGTLSLSPGESATLSCRASQRVASNYLAWYQHKPGQAPSLLISGASSRATGVPDRFSGSGSGTDFTLAISRLEPEDSAVYYCQHYDSSPSWTFGQGTKVEIKTTTPAPRPPTPAPTIASQPLSLRPEACRPAAGGAVHTRGLDFACDIYIWAPLAGTCGVLLLSLVITLYCKRGRKKLLYIFKQPFMRPVQTTQEEDGCSCRFPEEEEGGCELRVKFSRSADAPAYKQGQNQLYNELNLGRREEYDVLDKRRGRDPEMGGKPRRKNPQEGLYNELQKDKMAEAYSEIGMKGERRRGKGHDGLYQGLSTATKDTYDALHMQALPPR

SEQ ID NO: 321 - DNA, 1476 bp, Artificial Sequence
  Description of Artificial Sequence: Synthetic polynucleotide
atggccctccctgtcaccgccctgctgcttccgctggctcttctgctccacgccgctcggcccgaagtgcaactggtggaaaccggtggaggactcgtgcagcctggcggcagcctccggctgagctgcgccgcttcgggattcaccttttcctcctacgcgatgtcttgggtcagacaggcccccggaaaggggctggaatgggtgtcagccatctccggctccggcggatcaacgtactacgccgactccgtgaaaggccggttcaccatgtcgcgcgagaatgacaagaactccgtgttcctgcaaatgaactccctgagggtggaggacaccggagtgtactattgtgcgcgcgccaactacaagagagagctgcggtactactacggaatggacgtctggggacagggaactatggtgaccgtgtcatccggtggagggggaagcggcggtggaggcagcgggggcgggggttcagaaattgtcatgacccagtccccgggaactctttccctctcccccggggaatccgcgactttgtcctgccgggccagccagcgcgtggcctcgaactacctcgcatggtaccagcataagccaggccaagccccttccctgctgatttccggggctagcagccgcgccactggcgtgccggataggttctcgggaagcggctcgggtaccgatttcaccctggcaatctcgcggctggaaccggaggattcggccgtgtactactgccagcactatgactcatccccctcctggacattcggacagggcaccaaggtcgagatcaagaccactaccccagcaccgaggccacccaccccggctcctaccatcgcctcccagcctctgtccctgcgtccggaggcatgtagacccgcagctggtggggccgtgcatacccggggtcttgacttcgcctgcgatatctacatttgggcccctctggctggtacttgcggggtcctgctgctttcactcgtgatcactctttactgtaagcgcggtcggaagaagctgctgtacatctttaagcaacccttcatgaggcctgtgcagactactcaagaggaggacggctgttcatgccggttcccagaggaggaggaaggcggctgcgaactgcgcgtgaaattcagccgcagcgcagatgctccagcctacaagcaggggcagaaccagctctacaacgaactcaatcttggtcggagagaggagtacgacgtgctggacaagcggagaggacgggacccagaaatgggcgggaagccgcgcagaaagaatccccaagagggcctgtacaacgagctccaaaaggataagatggcagaagcctatagcgagattggtatgaaaggggaacgcagaagaggcaaaggccacgacggactgtaccagggactcagcaccgccaccaaggacacctatgacgctcttcacatgcaggccctgccgcctcgg

SEQ ID NO: 322 - protein, 244 aa, Artificial Sequence
  Description of Artificial Sequence: Synthetic polypeptide
EVQLLETGGGLVQPGGSLRLSCAASGFSFSSYAMSWVRQAPGKGLEWVSAISGSGGSTYYADSVKGRFTISRDNSKNTLYLQMNSLRAEDTAVYYCAKALVGATGAFDIWGQGTLVTVSSGGGGSGGGGSGGGGSEIVLTQSPGTLSLSPGERATLSCRASQSLSSNFLAWYQQKPGQAPGLLIYGASNWATGTPDRFSGSGSGTDFTLTITRLEPEDFAVYYCQYYGTSPMYTFGQGTKVEIK

SEQ ID NO: 323 - DNA, 732 bp, Artificial Sequence
  Description of Artificial Sequence: Synthetic polynucleotide
gaagtgcagctgctcgaaaccggtggagggctggtgcagccagggggctccctgaggctttcatgcgccgctagcggattctccttctcctcttacgccatgtcgtgggtccgccaagcccctggaaaaggcctggaatgggtgtccgcgatttccgggagcggaggttcgacctattacgccgactccgtgaagggccgctttaccatctcccgggataactccaagaacactctgtacctccaaatgaactcgctgagagccgaggacaccgccgtgtattactgcgcgaaggcgctggtcggcgcgactggggcattcgacatctggggacagggaactcttgtgaccgtgtcgagcggaggcggcggctccggcggaggagggagcgggggcggtggttccgaaatcgtgttgactcagtccccgggaaccctgagcttgtcacccggggagcgggccactctctcctgtcgcgcctcccaatcgctctcatccaatttcctggcctggtaccagcagaagcccggacaggccccgggcctgctcatctacggcgcttcaaactgggcaacgggaacccctgatcggttcagcggaagcggatcgggtactgactttaccctgaccatcaccagactggaaccggaggacttcgccgtgtactactgccagtactacggcacctcccccatgtacacattcggacagggtaccaaggtcgagattaag

SEQ ID NO: 324 - protein, 120 aa, Artificial Sequence
  Description of Artificial Sequence: Synthetic polypeptide
EVQLLETGGGLVQPGGSLRLSCAASGFSFSSYAMSWVRQAPGKGLEWVSAISGSGGSTYYADSVKGRFTISRDNSKNTLYLQMNSLRAEDTAVYYCAKALVGATGAFDIWGQGTLVTVSS

SEQ ID NO: 325 - protein, 109 aa, Artificial Sequence
  Description of Artificial Sequence: Synthetic polypeptide
EIVLTQSPGTLSLSPGERATLSCRASQSLSSNFLAWYQQKPGQAPGLLIYGASNWATGTPDRFSGSGSGTDFTLTITRLEPEDFAVYYCQYYGTSPMYTFGQGTKVEIK

SEQ ID NO: 326 - protein, 488 aa, Artificial Sequence
  Description of Artificial Sequence: Synthetic polypeptide
MALPVTALLLPLALLLHAARPEVQLLETGGGLVQPGGSLRLSCAASGFSFSSYAMSWVRQAPGKGLEWVSAISGSGGSTYYADSVKGRFTISRDNSKNTLYLQMNSLRAEDTAVYYCAKALVGATGAFDIWGQGTLVTVSSGGGGSGGGGSGGGGSEIVLTQSPGTLSLSPGERATLSCRASQSLSSNFLAWYQQKPGQAPGLLIYGASNWATGTPDRFSGSGSGTDFTLTITRLEPEDFAVYYCQYYGTSPMYTFGQGTKVEIKTTTPAPRPPTPAPTIASQPLSLRPEACRPAAGGAVHTRGLDFACDIYIWAPLAGTCGVLLLSLVITLYCKRGRKKLLYIFKQPFMRPVQTTQEEDGCSCRFPEEEEGGCELRVKFSRSADAPAYKQGQNQLYNELNLGRREEYDVLDKRRGRDPEMGGKPRRKNPQEGLYNELQKDKMAEAYSEIGMKGERRRGKGHDGLYQGLSTATKDTYDALHMQALPPR

SEQ ID NO: 327 - DNA, 1464 bp, Artificial Sequence
  Description of Artificial Sequence: Synthetic polynucleotide
atggccctccctgtcaccgccctgctgcttccgctggctcttctgctccacgccgctcggcccgaagtgcagctgctcgaaaccggtggagggctggtgcagccagggggctccctgaggctttcatgcgccgctagcggattctccttctcctcttacgccatgtcgtgggtccgccaagcccctggaaaaggcctggaatgggtgtccgcgatttccgggagcggaggttcgacctattacgccgactccgtgaagggccgctttaccatctcccgggataactccaagaacactctgtacctccaaatgaactcgctgagagccgaggacaccgccgtgtattactgcgcgaaggcgctggtcggcgcgactggggcattcgacatctggggacagggaactcttgtgaccgtgtcgagcggaggcggcggctccggcggaggagggagcgggggcggtggttccgaaatcgtgttgactcagtccccgggaaccctgagcttgtcacccggggagcgggccactctctcctgtcgcgcctcccaatcgctctcatccaatttcctggcctggtaccagcagaagcccggacaggccccgggcctgctcatctacggcgcttcaaactgggcaacgggaacccctgatcggttcagcggaagcggatcgggtactgactttaccctgaccatcaccagactggaaccggaggacttcgccgtgtactactgccagtactacggcacctcccccatgtacacattcggacagggtaccaaggtcgagattaagaccactaccccagcaccgaggccacccaccccggctcctaccatcgcctcccagcctctgtccctgcgtccggaggcatgtagacccgcagctggtggggccgtgcatacccggggtcttgacttcgcctgcgatatctacatttgggcccctctggctggtacttgcggggtcctgctgctttcactcgtgatcactctttactgtaagcgcggtcggaagaagctgctgtacatctttaagcaacccttcatgaggcctgtgcagactactcaagaggaggacggctgttcatgccggttcccagaggaggaggaaggcggctgcgaactgcgcgtgaaattcagccgcagcgcagatgctccagcctacaagcaggggcagaaccagctctacaacgaactcaatcttggtcggagagaggagtacgacgtgctggacaagcggagaggacgggacccagaaatgggcgggaagccgcgcagaaagaatccccaagagggcctgtacaacgagctccaaaaggataagatggcagaagcctatagcgagattggtatgaaaggggaacgcagaagaggcaaaggccacgacggactgtaccagggactcagcaccgccaccaaggacacctatgacgctcttcacatgcaggccctgccgcctcgg

SEQ ID NO: 328 - protein, 244 aa, Artificial Sequence
  Description of Artificial Sequence: Synthetic polypeptide
EVQLLESGGGLVQPGGSLRLSCAASGFTFSSYAMSWVRQAPGKGLEWVSAISGSGGSTYYADSVKGRFTISRDNSKNTLYLQMNSLRAEDTAVYYCVLWFGEGFDPWGQGTLVTVSSGGGGSGGGGSGGGGSDIVLTQSPLSLPVTPGEPASISCRSSQSLLHSNGYNYLDWYLQKPGQSPQLLIYLGSNRASGVPDRFSGSGSGTDFTLKISRVEAEDVGVYYCMQALQTPLTFGGGTKVDIK

SEQ ID NO: 329 - DNA, 733 bp, Artificial Sequence
  Description of Artificial Sequence: Synthetic polynucleotide
gaagtgcagctgcttgagagcggtggaggtctggtgcagcccgggggatcactgcgcctgtcctgtgccgcgtccggtttcactttctcctcgtacgccatgtcgtgggtcagacaggcaccgggaaagggactggaatgggtgtcagccatttcgggttcggggggcagcacctactacgctgactccgtgaagggccggttcaccatttcccgcgacaactccaagaacaccttgtacctccaaatgaactccctgcgggccgaagataccgccgtgtattactgcgtgctgtggttcggagagggattcgacccgtggggacaaggaacactcgtgactgtgtcatccggcggaggcggcagcggtggcggcggttccggcggcggcggatctgacatcgtgttgacccagtcccctctgagcctgccggtcactcctggcgaaccagccagcatctcctgccggtcgagccagtccctcctgcactccaatgggtacaactacctcgattggtatctgcaaaagccgggccagagcccccagctgctgatctaccttgggtcaaaccgcgcttccggggtgcctgatagattctccgggtccgggagcggaaccgactttaccctgaaaatctcgagggtggaggccgaggacgtcggagtgtactactgcatgcaggcgctccagactcccctgaccttcggaggaggaacgaaggtcgacatcaaga

SEQ ID NO: 330 - protein, 117 aa, Artificial Sequence
  Description of Artificial Sequence: Synthetic polypeptide
EVQLLESGGGLVQPGGSLRLSCAASGFTFSSYAMSWVRQAPGKGLEWVSAISGSGGSTYYADSVKGRFTISRDNSKNTLYLQMNSLRAEDTAVYYCVLWFGEGFDPWGQGTLVTVSS

SEQ ID NO: 331 - protein, 112 aa, Artificial Sequence
  Description of Artificial Sequence: Synthetic polypeptide
DIVLTQSPLSLPVTPGEPASISCRSSQSLLHSNGYNYLDWYLQKPGQSPQLLIYLGSNRASGVPDRFSGSGSGTDFTLKISRVEAEDVGVYYCMQALQTPLTFGGGTKVDIK

SEQ ID NO: 332 - protein, 488 aa, Artificial Sequence
  Description of Artificial Sequence: Synthetic polypeptide
MALPVTALLLPLALLLHAARPEVQLLESGGGLVQPGGSLRLSCAASGFTFSSYAMSWVRQAPGKGLEWVSAISGSGGSTYYADSVKGRFTISRDNSKNTLYLQMNSLRAEDTAVYYCVLWFGEGFDPWGQGTLVTVSSGGGGSGGGGSGGGGSDIVLTQSPLSLPVTPGEPASISCRSSQSLLHSNGYNYLDWYLQKPGQSPQLLIYLGSNRASGVPDRFSGSGSGTDFTLKISRVEAEDVGVYYCMQALQTPLTFGGGTKVDIKTTTPAPRPPTPAPTIASQPLSLRPEACRPAAGGAVHTRGLDFACDIYIWAPLAGTCGVLLLSLVITLYCKRGRKKLLYIFKQPFMRPVQTTQEEDGCSCRFPEEEEGGCELRVKFSRSADAPAYKQGQNQLYNELNLGRREEYDVLDKRRGRDPEMGGKPRRKNPQEGLYNELQKDKMAEAYSEIGMKGERRRGKGHDGLYQGLSTATKDTYDALHMQALPPR

SEQ ID NO: 333 - DNA, 1464 bp, Artificial Sequence
  Description of Artificial Sequence: Synthetic polynucleotide
atggccctccctgtcaccgccctgctgcttccgctggctcttctgctccacgccgctcggcccgaagtgcagctgcttgagagcggtggaggtctggtgcagcccgggggatcactgcgcctgtcctgtgccgcgtccggtttcactttctcctcgtacgccatgtcgtgggtcagacaggcaccgggaaagggactggaatgggtgtcagccatttcgggttcggggggcagcacctactacgctgactccgtgaagggccggttcaccatttcccgcgacaactccaagaacaccttgtacctccaaatgaactccctgcgggccgaagataccgccgtgtattactgcgtgctgtggttcggagagggattcgacccgtggggacaaggaacactcgtgactgtgtcatccggcggaggcggcagcggtggcggcggttccggcggcggcggatctgacatcgtgttgacccagtcccctctgagcctgccggtcactcctggcgaaccagccagcatctcctgccggtcgagccagtccctcctgcactccaatgggtacaactacctcgattggtatctgcaaaagccgggccagagcccccagctgctgatctaccttgggtcaaaccgcgcttccggggtgcctgatagattctccgggtccgggagcggaaccgactttaccctgaaaatctcgagggtggaggccgaggacgtcggagtgtactactgcatgcaggcgctccagactcccctgaccttcggaggaggaacgaaggtcgacatcaagaccactaccccagcaccgaggccacccaccccggctcctaccatcgcctcccagcctctgtccctgcgtccggaggcatgtagacccgcagctggtggggccgtgcatacccggggtcttgacttcgcctgcgatatctacatttgggcccctctggctggtacttgcggggtcctgctgctttcactcgtgatcactctttactgtaagcgcggtcggaagaagctgctgtacatctttaagcaacccttcatgaggcctgtgcagactactcaagaggaggacggctgttcatgccggttcccagaggaggaggaaggcggctgcgaactgcgcgtgaaattcagccgcagcgcagatgctccagcctacaagcaggggcagaaccagctctacaacgaactcaatcttggtcggagagaggagtacgacgtgctggacaagcggagaggacgggacccagaaatgggcgggaagccgcgcagaaagaatccccaagagggcctgtacaacgagctccaaaaggataagatggcagaagcctatagcgagattggtatgaaaggggaacgcagaagaggcaaaggccacgacggactgtaccagggactcagcaccgccaccaaggacacctatgacgctcttcacatgcaggccctgccgcctcgg

SEQ ID NO: 334 - protein, 251 aa, Artificial Sequence
  Description of Artificial Sequence: Synthetic polypeptide
QVQLVESGGGLVQPGGSLRLSCAASGFTFSSYAMSWVRQAPGKGLEWVSAISGSGGSTYYADSVKGRFTISRDNSKNTLYLQMNSLRAEDTAVYYCAKVGYDSSGYYRDYYGMDVWGQGTTVTVSSGGGGSGGGGSGGGGSEIVLTQSPGTLSLSPGERATLSCRASQSVSSSYLAWYQQKPGQAPRLLIYGTSSRATGISDRFSGSGSGTDFTLTISRLEPEDFAVYYCQHYGNSPPKFTFGPGTKLEIK

SEQ ID NO: 335 - DNA, 753 bp, Artificial Sequence
  Description of Artificial Sequence: Synthetic polynucleotide
caagtgcagctcgtggagtcaggcggaggactggtgcagcccgggggctccctgagactttcctgcgcggcatcgggttttaccttctcctcctatgctatgtcctgggtgcgccaggccccgggaaagggactggaatgggtgtccgcaatcagcggtagcgggggctcaacatactacgccgactccgtcaagggtcgcttcactatttcccgggacaactccaagaataccctgtacctccaaatgaacagcctcagggccgaggatactgccgtgtactactgcgccaaagtcggatacgatagctccggttactaccgggactactacggaatggacgtgtggggacagggcaccaccgtgaccgtgtcaagcggcggaggcggttcaggagggggaggctccggcggtggagggtccgaaatcgtcctgactcagtcgcctggcactctgtcgttgtccccgggggagcgcgctaccctgtcgtgtcgggcgtcgcagtccgtgtcgagctcctacctcgcgtggtaccagcagaagcccggacaggcccctagacttctgatctacggcacttcttcacgcgccaccgggatcagcgacaggttcagcggctccggctccgggaccgacttcaccctgaccattagccggctggagcctgaagatttcgccgtgtattactgccaacactacggaaactcgccgccaaagttcacgttcggacccggaaccaagctggaaatcaag

SEQ ID NO: 336 - protein, 126 aa, Artificial Sequence
  Description of Artificial Sequence: Synthetic polypeptide
QVQLVESGGGLVQPGGSLRLSCAASGFTFSSYAMSWVRQAPGKGLEWVSAISGSGGSTYYADSVKGRFTISRDNSKNTLYLQMNSLRAEDTAVYYCAKVGYDSSGYYRDYYGMDVWGQGTTVTVSS

SEQ ID NO: 337 - protein, 110 aa, Artificial Sequence
  Description of Artificial Sequence: Synthetic polypeptide
EIVLTQSPGTLSLSPGERATLSCRASQSVSSSYLAWYQQKPGQAPRLLIYGTSSRATGISDRFSGSGSGTDFTLTISRLEPEDFAVYYCQHYGNSPPKFTFGPGTKLEIK

SEQ ID NO: 338 - protein, 495 aa, Artificial Sequence
  Description of Artificial Sequence: Synthetic polypeptide
MALPVTALLLPLALLLHAARPQVQLVESGGGLVQPGGSLRLSCAASGFTFSSYAMSWVRQAPGKGLEWVSAISGSGGSTYYADSVKGRFTISRDNSKNTLYLQMNSLRAEDTAVYYCAKVGYDSSGYYRDYYGMDVWGQGTTVTVSSGGGGSGGGGSGGGGSEIVLTQSPGTLSLSPGERATLSCRASQSVSSSYLAWYQQKPGQAPRLLIYGTSSRATGISDRFSGSGSGTDFTLTISRLEPEDFAVYYCQHYGNSPPKFTFGPGTKLEIKTTTPAPRPPTPAPTIASQPLSLRPEACRPAAGGAVHTRGLDFACDIYIWAPLAGTCGVLLLSLVITLYCKRGRKKLLYIFKQPFMRPVQTTQEEDGCSCRFPEEEEGGCELRVKFSRSADAPAYKQGQNQLYNELNLGRREEYDVLDKRRGRDPEMGGKPRRKNPQEGLYNELQKDKMAEAYSEIGMKGERRRGKGHDGLYQGLSTATKDTYDALHMQALPPR

SEQ ID NO: 339 - DNA, 1485 bp, Artificial Sequence
  Description of Artificial Sequence: Synthetic polynucleotide
atggccctccctgtcaccgccctgctgcttccgctggctcttctgctccacgccgctcggccccaagtgcagctcgtggagtcaggcggaggactggtgcagcccgggggctccctgagactttcctgcgcggcatcgggttttaccttctcctcctatgctatgtcctgggtgcgccaggccccgggaaagggactggaatgggtgtccgcaatcagcggtagcgggggctcaacatactacgccgactccgtcaagggtcgcttcactatttcccgggacaactccaagaataccctgtacctccaaatgaacagcctcagggccgaggatactgccgtgtactactgcgccaaagtcggatacgatagctccggttactaccgggactactacggaatggacgtgtggggacagggcaccaccgtgaccgtgtcaagcggcggaggcggttcaggagggggaggctccggcggtggagggtccgaaatcgtcctgactcagtcgcctggcactctgtcgttgtccccgggggagcgcgctaccctgtcgtgtcgggcgtcgcagtccgtgtcgagctcctacctcgcgtggtaccagcagaagcccggacaggcccctagacttctgatctacggcacttcttcacgcgccaccgggatcagcgacaggttcagcggctccggctccgggaccgacttcaccctgaccattagccggctggagcctgaagatttcgccgtgtattactgccaacactacggaaactcgccgccaaagttcacgttcggacccggaaccaagctggaaatcaagaccactaccccagcaccgaggccacccaccccggctcctaccatcgcctcccagcctctgtccctgcgtccggaggcatgtagacccgcagctggtggggccgtgcatacccggggtcttgacttcgcctgcgatatctacatttgggcccctctggctggtacttgcggggtcctgctgctttcactcgtgatcactctttactgtaagcgcggtcggaagaagctgctgtacatctttaagcaacccttcatgaggcctgtgcagactactcaagaggaggacggctgttcatgccggttcccagaggaggaggaaggcggctgcgaactgcgcgtgaaattcagccgcagcgcagatgctccagcctacaagcaggggcagaaccagctctacaacgaactcaatcttggtcggagagaggagtacgacgtgctggacaagcggagaggacgggacccagaaatgggcgggaagccgcgcagaaagaatccccaagagggcctgtacaacgagctccaaaaggataagatggcagaagcctatagcgagattggtatgaaaggggaacgcagaagaggcaaaggccacgacggactgtaccagggactcagcaccgccaccaaggacacctatgacgctcttcacatgcaggccctgccgcctcgg

SEQ ID NO: 340 - protein, 246 aa, Artificial Sequence
  Description of Artificial Sequence: Synthetic polypeptide
EVQLVESGGGLVQPGGSLRLSCAASGFTFSSYAMSWVRQAPGKGLEWVSAISGSGGSTYYADSVKGRFTISRDNSKNTLYLQMNSLRAEDTAVYYCAKMGWSSGYLGAFDIWGQGTTVTVSSGGGGSGGGGSGGGGSEIVLTQSPGTLSLSPGERATLSCRASQSVASSFLAWYQQKPGQAPRLLIYGASGRATGIPDRFSGSGSGTDFTLTISRLEPEDFAVYYCQHYGGSPRLTFGGGTKVDIK

SEQ ID NO: 341 - DNA, 739 bp, Artificial Sequence
  Description of Artificial Sequence: Synthetic polynucleotide
gaagtccaactggtggagtccgggggagggctcgtgcagcccggaggcagccttcggctgtcgtgcgccgcctccgggttcacgttctcatcctacgcgatgtcgtgggtcagacaggcaccaggaaagggactggaatgggtgtccgccattagcggctccggcggtagcacctactatgccgactcagtgaagggaaggttcactatctcccgcgacaacagcaagaacaccctgtacctccaaatgaactctctgcgggccgaggataccgcggtgtactattgcgccaagatgggttggtccagcggatacttgggagccttcgacatttggggacagggcactactgtgaccgtgtcctccgggggtggcggatcgggaggcggcggctcgggtggagggggttccgaaatcgtgttgacccagtcaccgggaaccctctcgctgtccccgggagaacgggctacactgtcatgtagagcgtcccagtccgtggcttcctcgttcctggcctggtaccagcagaagccgggacaggcaccccgcctgctcatctacggagccagcggccgggcgaccggcatccctgaccgcttctccggttccggctcgggcaccgactttactctgaccattagcaggcttgagcccgaggattttgccgtgtactactgccaacactacggggggagccctcgcctgaccttcggaggcggaactaaggtcgatatcaaaa

SEQ ID NO: 342 - protein, 122 aa, Artificial Sequence
  Description of Artificial Sequence: Synthetic polypeptide
EVQLVESGGGLVQPGGSLRLSCAASGFTFSSYAMSWVRQAPGKGLEWVSAISGSGGSTYYADSVKGRFTISRDNSKNTLYLQMNSLRAEDTAVYYCAKMGWSSGYLGAFDIWGQGTTVTVSS

SEQ ID NO: 343 - protein, 109 aa, Artificial Sequence
  Description of Artificial Sequence: Synthetic polypeptide
EIVLTQSPGTLSLSPGERATLSCRASQSVASSFLAWYQQKPGQAPRLLIYGASGRATGIPDRFSGSGSGTDFTLTISRLEPEDFAVYYCQHYGGSPRLTFGGGTKVDIK

SEQ ID NO: 344 - protein, 490 aa, Artificial Sequence
  Description of Artificial Sequence: Synthetic polypeptide
MALPVTALLLPLALLLHAARPEVQLVESGGGLVQPGGSLRLSCAASGFTFSSYAMSWVRQAPGKGLEWVSAISGSGGSTYYADSVKGRFTISRDNSKNTLYLQMNSLRAEDTAVYYCAKMGWSSGYLGAFDIWGQGTTVTVSSGGGGSGGGGSGGGGSEIVLTQSPGTLSLSPGERATLSCRASQSVASSFLAWYQQKPGQAPRLLIYGASGRATGIPDRFSGSGSGTDFTLTISRLEPEDFAVYYCQHYGGSPRLTFGGGTKVDIKTTTPAPRPPTPAPTIASQPLSLRPEACRPAAGGAVHTRGLDFACDIYIWAPLAGTCGVLLLSLVITLYCKRGRKKLLYIFKQPFMRPVQTTQEEDGCSCRFPEEEEGGCELRVKFSRSADAPAYKQGQNQLYNELNLGRREEYDVLDKRRGRDPEMGGKPRRKNPQEGLYNELQKDKMAEAYSEIGMKGERRRGKGHDGLYQGLSTATKDTYDALHMQALPPR

SEQ ID NO: 345 - DNA, 1470 bp, Artificial Sequence
  Description of Artificial Sequence: Synthetic polynucleotide
atggccctccctgtcaccgccctgctgcttccgctggctcttctgctccacgccgctcggcccgaagtccaactggtggagtccgggggagggctcgtgcagcccggaggcagccttcggctgtcgtgcgccgcctccgggttcacgttctcatcctacgcgatgtcgtgggtcagacaggcaccaggaaagggactggaatgggtgtccgccattagcggctccggcggtagcacctactatgccgactcagtgaagggaaggttcactatctcccgcgacaacagcaagaacaccctgtacctccaaatgaactctctgcgggccgaggataccgcggtgtactattgcgccaagatgggttggtccagcggatacttgggagccttcgacatttggggacagggcactactgtgaccgtgtcctccgggggtggcggatcgggaggcggcggctcgggtggagggggttccgaaatcgtgttgacccagtcaccgggaaccctctcgctgtccccgggagaacgggctacactgtcatgtagagcgtcccagtccgtggcttcctcgttcctggcctggtaccagcagaagccgggacaggcaccccgcctgctcatctacggagccagcggccgggcgaccggcatccctgaccgcttctccggttccggctcgggcaccgactttactctgaccattagcaggcttgagcccgaggattttgccgtgtactactgccaacactacggggggagccctcgcctgaccttcggaggcggaactaaggtcgatatcaaaaccactaccccagcaccgaggccacccaccccggctcctaccatcgcctcccagcctctgtccctgcgtccggaggcatgtagacccgcagctggtggggccgtgcatacccggggtcttgacttcgcctgcgatatctacatttgggcccctctggctggtacttgcggggtcctgctgctttcactcgtgatcactctttactgtaagcgcggtcggaagaagctgctgtacatctttaagcaacccttcatgaggcctgtgcagactactcaagaggaggacggctgttcatgccggttcccagaggaggaggaaggcggctgcgaactgcgcgtgaaattcagccgcagcgcagatgctccagcctacaagcaggggcagaaccagctctacaacgaactcaatcttggtcggagagaggagtacgacgtgctggacaagcggagaggacgggacccagaaatgggcgggaagccgcgcagaaagaatccccaagagggcctgtacaacgagctccaaaaggataagatggcagaagcctatagcgagattggtatgaaaggggaacgcagaagaggcaaaggccacgacggactgtaccagggactcagcaccgccaccaaggacacctatgacgctcttcacatgcaggccctgccgcctcgg

SEQ ID NO: 346 - protein, 122 aa, Artificial Sequence
  Description of Artificial Sequence: Synthetic polypeptide
QIQLVQSGPDLKKPGETVKLSCKASGYTFTNFGMNWVKQAPGKGFKWMAWINTYTGESYFADDFKGRFAFSVETSATTAYLQINNLKTEDTATYFCARGEIYYGYDGGFAYWGQGTLVTVSA

SEQ ID NO: 347 - protein, 107 aa, Artificial Sequence
  Description of Artificial Sequence: Synthetic polypeptide
DVVMTQSHRFMSTSVGDRVSITCRASQDVNTAVSWYQQKPGQSPKLLIFSASYRYTGVPDRFTGSGSGADFTLTISSVQAEDLAVYYCQQHYSTPWTFGGGTKLDIK

SEQ ID NO: 348 - protein, 244 aa, Artificial Sequence
  Description of Artificial Sequence: Synthetic polypeptide
QIQLVQSGPDLKKPGETVKLSCKASGYTFTNFGMNWVKQAPGKGFKWMAWINTYTGESYFADDFKGRFAFSVETSATTAYLQINNLKTEDTATYFCARGEIYYGYDGGFAYWGQGTLVTVSAGGGGSGGGGSGGGGSDVVMTQSHRFMSTSVGDRVSITCRASQDVNTAVSWYQQKPGQSPKLLIFSASYRYTGVPDRFTGSGSGADFTLTISSVQAEDLAVYYCQQHYSTPWTFGGGTKLDIK

SEQ ID NO: 349 - protein, 467 aa, Artificial Sequence
  Description of Artificial Sequence: Synthetic polypeptide
QIQLVQSGPDLKKPGETVKLSCKASGYTFTNFGMNWVKQAPGKGFKWMAWINTYTGESYFADDFKGRFAFSVETSATTAYLQINNLKTEDTATYFCARGEIYYGYDGGFAYWGQGTLVTVSAGGGGSGGGGSGGGGSDVVMTQSHRFMSTSVGDRVSITCRASQDVNTAVSWYQQKPGQSPKLLIFSASYRYTGVPDRFTGSGSGADFTLTISSVQAEDLAVYYCQQHYSTPWTFGGGTKLDIKTTTPAPRPPTPAPTIASQPLSLRPEACRPAAGGAVHTRGLDFACDIYIWAPLAGTCGVLLLSLVITLYCKRGRKKLLYIFKQPFMRPVQTTQEEDGCSCRFPEEEEGGCELRVKFSRSADAPAYKQGQNQLYNELNLGRREEYDVLDKRRGRDPEMGGKPRRKNPQEGLYNELQKDKMAEAYSEIGMKGERRRGKGHDGLYQGLSTATKDTYDALHMQALPPR

SEQ ID NO: 350 - protein, 117 aa, Artificial Sequence
  Description of Artificial Sequence: Synthetic polypeptide
QIQLVQSGPELKKPGETVKISCKASGYTFTDYSINWVKRAPGKGLKWMGWINTETREPAYAYDFRGRFAFSLETSASTAYLQINNLKYEDTATYFCALDYSYAMDYWGQGTSVTVSS

SEQ ID NO: 351 - protein, 111 aa, Artificial Sequence
  Description of Artificial Sequence: Synthetic polypeptide
DIVLTQSPASLAMSLGKRATISCRASESVSVIGAHLIHWYQQKPGQPPKLLIYLASNLETGVPARFSGSGSGTDFTLTIDPVEEDDVAIYSCLQSRIFPRTFGGGTKLEIK

SEQ ID NO: 352 - protein, 249 aa, Artificial Sequence
  Description of Artificial Sequence: Synthetic polypeptide
QIQLVQSGPELKKPGETVKISCKASGYTFTDYSINWVKRAPGKGLKWMGWINTETREPAYAYDFRGRFAFSLETSASTAYLQINNLKYEDTATYFCALDYSYAMDYWGQGTSVTVSSGGGGSGGGGSGGGGSQIQLVQSGPELKKPGETVKISCKASGYTFTDYSINWVKRAPGKGLKWMGWINTETREPAYAYDFRGRFAFSLETSASTAYLQINNLKYEDTATYFCALDYSYAMDYWGQGTSVTVSS

SEQ ID NO: 353 - protein, 472 aa, Artificial Sequence
  Description of Artificial Sequence: Synthetic polypeptide
QIQLVQSGPELKKPGETVKISCKASGYTFTDYSINWVKRAPGKGLKWMGWINTETREPAYAYDFRGRFAFSLETSASTAYLQINNLKYEDTATYFCALDYSYAMDYWGQGTSVTVSSGGGGSGGGGSGGGGSQIQLVQSGPELKKPGETVKISCKASGYTFTDYSINWVKRAPGKGLKWMGWINTETREPAYAYDFRGRFAFSLETSASTAYLQINNLKYEDTATYFCALDYSYAMDYWGQGTSVTVSSTTTPAPRPPTPAPTIASQPLSLRPEACRPAAGGAVHTRGLDFACDIYIWAPLAGTCGVLLLSLVITLYCKRGRKKLLYIFKQPFMRPVQTTQEEDGCSCRFPEEEEGGCELRVKFSRSADAPAYKQGQNQLYNELNLGRREEYDVLDKRRGRDPEMGGKPRRKNPQEGLYNELQKDKMAEAYSEIGMKGERRRGKGHDGLYQGLSTATKDTYDALHMQALPPR

SEQ ID NO: 354 - protein, 117 aa, Artificial Sequence
  Description of Artificial Sequence: Synthetic polypeptide
QIQLVQSGPELKKPGETVKISCKASGYTFRHYSMNWVKQAPGKGLKWMGRINTESGVPIYADDFKGRFAFSVETSASTAYLVINNLKDEDTASYFCSNDYLYSLDFWGQGTALTVSS

SEQ ID NO: 355 - protein, 111 aa, Artificial Sequence
  Description of Artificial Sequence: Synthetic polypeptide
DIVLTQSPPSLAMSLGKRATISCRASESVTILGSHLIYWYQQKPGQPPTLLIQLASNVQTGVPARFSGSGSRTDFTLTIDPVEEDDVAVYYCLQSRTIPRTFGGGTKLEIK

SEQ ID NO: 356 - protein, 243 aa, Artificial Sequence
  Description of Artificial Sequence: Synthetic polypeptide
QIQLVQSGPELKKPGETVKISCKASGYTFRHYSMNWVKQAPGKGLKWMGRINTESGVPIYADDFKGRFAFSVETSASTAYLVINNLKDEDTASYFCSNDYLYSLDFWGQGTALTVSSGGGGSGGGGSGGGGSDIVLTQSPPSLAMSLGKRATISCRASESVTILGSHLIYWYQQKPGQPPTLLIQLASNVQTGVPARFSGSGSRTDFTLTIDPVEEDDVAVYYCLQSRTIPRTFGGGTKLEIK

SEQ ID NO: 357 - protein, 466 aa, Artificial Sequence
  Description of Artificial Sequence: Synthetic polypeptide
QIQLVQSGPELKKPGETVKISCKASGYTFRHYSMNWVKQAPGKGLKWMGRINTESGVPIYADDFKGRFAFSVETSASTAYLVINNLKDEDTASYFCSNDYLYSLDFWGQGTALTVSSGGGGSGGGGSGGGGSDIVLTQSPPSLAMSLGKRATISCRASESVTILGSHLIYWYQQKPGQPPTLLIQLASNVQTGVPARFSGSGSRTDFTLTIDPVEEDDVAVYYCLQSRTIPRTFGGGTKLEIKTTTPAPRPPTPAPTIASQPLSLRPEACRPAAGGAVHTRGLDFACDIYIWAPLAGTCGVLLLSLVITLYCKRGRKKLLYIFKQPFMRPVQTTQEEDGCSCRFPEEEEGGCELRVKFSRSADAPAYKQGQNQLYNELNLGRREEYDVLDKRRGRDPEMGGKPRRKNPQEGLYNELQKDKMAEAYSEIGMKGERRRGKGHDGLYQGLSTATKDTYDALHMQALPPR

SEQ ID NO: 358 - protein, 117 aa, Artificial Sequence
  Description of Artificial Sequence: Synthetic polypeptide
QIQLVQSGPELKKPGETVKISCKASGYTFTHYSMNWVKQAPGKGLKWMGRINTETGEPLYADDFKGRFAFSLETSASTAYLVINNLKNEDTATFFCSNDYLYSCDYWGQGTTLTVSS

SEQ ID NO: 359 - protein, 111 aa, Artificial Sequence; identical to SEQ ID NO: 355
  Description of Artificial Sequence: Synthetic polypeptide

SEQ ID NO: 360 - protein, 243 aa, Artificial Sequence
  Description of Artificial Sequence: Synthetic polypeptide
QIQLVQSGPELKKPGETVKISCKASGYTFTHYSMNWVKQAPGKGLKWMGRINTETGEPLYADDFKGRFAFSLETSASTAYLVINNLKNEDTATFFCSNDYLYSCDYWGQGTTLTVSSGGGGSGGGGSGGGGSDIVLTQSPPSLAMSLGKRATISCRASESVTILGSHLIYWYQQKPGQPPTLLIQLASNVQTGVPARFSGSGSRTDFTLTIDPVEEDDVAVYYCLQSRTIPRTFGGGTKLEIK

SEQ ID NO: 361 - protein, 466 aa, Artificial Sequence
  Description of Artificial Sequence: Synthetic polypeptide
QIQLVQSGPELKKPGETVKISCKASGYTFTHYSMNWVKQAPGKGLKWMGRINTETGEPLYADDFKGRFAFSLETSASTAYLVINNLKNEDTATFFCSNDYLYSCDYWGQGTTLTVSSGGGGSGGGGSGGGGSDIVLTQSPPSLAMSLGKRATISCRASESVTILGSHLIYWYQQKPGQPPTLLIQLASNVQTGVPARFSGSGSRTDFTLTIDPVEEDDVAVYYCLQSRTIPRTFGGGTKLEIKTTTPAPRPPTPAPTIASQPLSLRPEACRPAAGGAVHTRGLDFACDIYIWAPLAGTCGVLLLSLVITLYCKRGRKKLLYIFKQPFMRPVQTTQEEDGCSCRFPEEEEGGCELRVKFSRSADAPAYKQGQNQLYNELNLGRREEYDVLDKRRGRDPEMGGKPRRKNPQEGLYNELQKDKMAEAYSEIGMKGERRRGKGHDGLYQGLSTATKDTYDALHMQALPPR

SEQ ID NO: 362 - protein, 21 aa, Artificial Sequence
  Description of Artificial Sequence: Synthetic peptide
MALPVTALLLPLALLLHAARP

SEQ ID NO: 363 - DNA, 63 bp, Artificial Sequence; identical to SEQ ID NO: 3
  Description of Artificial Sequence: Synthetic oligonucleotide

SEQ ID NO: 364 - DNA, 63 bp, Artificial Sequence
  Description of Artificial Sequence: Synthetic oligonucleotide
atggccctccctgtcaccgccctgctgcttccgctggctcttctgctccacgccgctcggccc

SEQ ID NO: 365 - protein, 45 aa, Artificial Sequence; identical to SEQ ID NO: 4
  Description of Artificial Sequence: Synthetic polypeptide

SEQ ID NO: 366 - DNA, 135 bp, Artificial Sequence; identical to SEQ ID NO: 5
  Description of Artificial Sequence: Synthetic polynucleotide

SEQ ID NO: 367 - protein, 24 aa, Artificial Sequence
  Description of Artificial Sequence: Synthetic peptide
IYIWAPLAGTCGVLLLSLVITLYC

SEQ ID NO: 368 - DNA, 72 bp, Artificial Sequence; identical to SEQ ID NO: 13
  Description of Artificial Sequence: Synthetic oligonucleotide

SEQ ID NO: 369 - DNA, 72 bp, Artificial Sequence
  Description of Artificial Sequence: Synthetic oligonucleotide
atctacatttgggcccctctggctggtacttgcggggtcctgctgctttcactcgtgatcactctttactgt

SEQ ID NO: 370 - protein, 42 aa, Artificial Sequence; identical to SEQ ID NO: 14
  Description of Artificial Sequence: Synthetic polypeptide

SEQ ID NO: 371 - DNA, 126 bp, Artificial Sequence; identical to SEQ ID NO: 15
  Description of Artificial Sequence: Synthetic polynucleotide

SEQ ID NO: 372 - DNA, 126 bp, Artificial Sequence
  Description of Artificial Sequence: Synthetic polynucleotide
aagcgcggtcggaagaagctgctgtacatctttaagcaacccttcatgaggcctgtgcagactactcaagaggaggacggctgttcatgccggttcccagaggaggaggaaggcggctgcgaactg

SEQ ID NO: 373 - protein, 41 aa, Artificial Sequence
  Description of Artificial Sequence: Synthetic polypeptide
RSKRSRLLHSDYMNMTPRRPGPTRKHYQPYAPPRDFAAYRS

SEQ ID NO: 374 - DNA, 123 bp, Artificial Sequence; identical to SEQ ID NO: 17
  Description of Artificial Sequence: Synthetic polynucleotide

SEQ ID NO: 375 - protein, 35 aa, Unknown
  Description of Unknown: ICOS Intracellular domain sequence
TKKKYSSSVHDPNGEYMFMRAVNTAKKSRLTDVTL

SEQ ID NO: 376 - DNA, 105 bp, Unknown
  Description of Unknown: ICOS Intracellular domain sequence
acaaaaaagaagtattcatccagtgtgcacgaccctaacggtgaatacatgttcatgagagcagtgaacacagccaaaaaatccagactcacagatgtgacccta

SEQ ID NO: 377 - protein, 112 aa, Artificial Sequence; identical to SEQ ID NO: 18
  Description of Artificial Sequence: Synthetic polypeptide

SEQ ID NO: 378 - DNA, 336 bp, Artificial Sequence; identical to SEQ ID NO: 19
  Description of Artificial Sequence: Synthetic polynucleotide

SEQ ID NO: 379 - DNA, 336 bp, Artificial Sequence
  Description of Artificial Sequence: Synthetic polynucleotide
cgcgtgaaattcagccgcagcgcagatgctccagcctacaagcaggggcagaaccagctctacaacgaactcaatcttggtcggagagaggagtacgacgtgctggacaagcggagaggacgggacccagaaatgggcgggaagccgcgcagaaagaatccccaagagggcctgtacaacgagctccaaaaggataagatggcagaagcctatagcgagattggtatgaaaggggaacgcagaagaggcaaaggccacgacggactgtaccagggactcagcaccgccaccaaggacacctatgacgctcttcacatgcaggccctgccgcctcgg

SEQ ID NO: 380 - protein, 112 aa, Homo sapiens; identical to SEQ ID NO: 20

SEQ ID NO: 381 - DNA, 336 bp, Homo sapiens; identical to SEQ ID NO: 21

SEQ ID NO: 382 - protein, 230 aa, Artificial Sequence; identical to SEQ ID NO: 6
  Description of Artificial Sequence: Synthetic polypeptide

SEQ ID NO: 383 - DNA, 690 bp, Artificial Sequence; identical to SEQ ID NO: 7
  Description of Artificial Sequence: Synthetic polynucleotide

SEQ ID NO: 384 - protein, 20 aa, Artificial Sequence
  Description of Artificial Sequence: Synthetic peptide
GGGGSGGGGSGGGGSGGGGS

SEQ ID NO: 385 - protein, 15 aa, Artificial Sequence
  Description of Artificial Sequence: Synthetic peptide
GGGGSGGGGSGGGGS

SEQ ID NO: 386 - protein, 4 aa, Artificial Sequence
  Description of Artificial Sequence: Synthetic peptide
GGGS

SEQ ID NO: 387 - protein, 40 aa, Artificial Sequence; identical to SEQ ID NO: 28
  Description of Artificial Sequence: Synthetic polypeptide
  MISC_FEATURE (1)..(40): This sequence may encompass 1-10 "Gly Gly Gly Ser" repeating units
  See specification as filed for detailed description of substitutions and preferred embodiments

SEQ ID NO: 388 - RNA, 5000 nt, Artificial Sequence; identical to SEQ ID NO: 34
  Description of Artificial Sequence: Synthetic polynucleotide
  misc_feature (1)..(5000): This sequence may encompass 50-5000 nucleotides
  See specification as filed for detailed description of substitutions and preferred embodiments

SEQ ID NO: 389 - RNA, 2000 nt, Artificial Sequence; identical to SEQ ID NO: 32
  Description of Artificial Sequence: Synthetic polynucleotide

SEQ ID NO: 390 - RNA, 64 nt, Artificial Sequence; identical to SEQ ID NO: 37
  Description of Artificial Sequence: Synthetic oligonucleotide

SEQ ID NO: 391 - RNA, 150 nt, Artificial Sequence; identical to SEQ ID NO: 33
  Description of Artificial Sequence: Synthetic polynucleotide

SEQ ID NO: 392 - RNA, 400 nt, Artificial Sequence; identical to SEQ ID NO: 38
  Description of Artificial Sequence: Synthetic polynucleotide
  See specification as filed for detailed description of substitutions and preferred embodiments

SEQ ID NO: 393 - protein, 10 aa, Artificial Sequence
  Description of Artificial Sequence: Synthetic peptide
GGGGSGGGGS

SEQ ID NO: 394 - DNA, 30 bp, Artificial Sequence; identical to SEQ ID NO: 11
  Description of Artificial Sequence: Synthetic oligonucleotide

SEQ ID NO: 395 - protein, 5 aa, Artificial Sequence
  Description of Artificial Sequence: Synthetic peptide
NHGMS

SEQ ID NO: 396 - protein, 16 aa, Artificial Sequence
  Description of Artificial Sequence: Synthetic peptide
GIVYSGSTYYAASVKG

SEQ ID NO: 397 - protein, 7 aa, Artificial Sequence
  Description of Artificial Sequence: Synthetic peptide
HGGESDV

SEQ ID NO: 398 - protein, 5 aa, Artificial Sequence
  Description of Artificial Sequence: Synthetic peptide
NYAMS

SEQ ID NO: 399 - protein, 17 aa, Artificial Sequence
  Description of Artificial Sequence: Synthetic peptide
GISRSGENTYYADSVKG

SEQ ID NO: 400 - protein, 11 aa, Artificial Sequence
  Description of Artificial Sequence: Synthetic peptide
SPAHYYGGMDV

SEQ ID NO: 401 - protein, 5 aa, Artificial Sequence
  Description of Artificial Sequence: Synthetic peptide
DYAMH

SEQ ID NO: 402 - protein, 17 aa, Artificial Sequence
  Description of Artificial Sequence: Synthetic peptide
GISWNSGSIGYADSVKG

SEQ ID NO: 403 - protein, 6 aa, Artificial Sequence
  Description of Artificial Sequence: Synthetic peptide
HSFLAY

SEQ ID NO: 404 - protein, 5 aa, Artificial Sequence
  Description of Artificial Sequence: Synthetic peptide
NHGMS

SEQ ID NO: 405 - protein, 16 aa, Artificial Sequence
  Description of Artificial Sequence: Synthetic peptide
GIVYSGSTYYAASVKG

SEQ ID NO: 406 - protein, 7 aa, Artificial Sequence
  Description of Artificial Sequence: Synthetic peptide
HGGESDV

SEQ ID NO: 407 - protein, 5 aa, Artificial Sequence
  Description of Artificial Sequence: Synthetic peptide
NFGIN

SEQ ID NO: 408 - protein, 17 aa, Artificial Sequence
  Description of Artificial Sequence: Synthetic peptide
WINPKNNNTNYAQKFQG

SEQ ID NO: 409 - protein, 11 aa, Artificial Sequence
  Description of Artificial Sequence: Synthetic peptide
GPYYYQSYMDV

SEQ ID NO: 410 - protein, 5 aa, Artificial Sequence
  Description of Artificial Sequence: Synthetic peptide
SDAMT

SEQ ID NO: 411 - protein, 17 aa, Artificial Sequence
  Description of Artificial Sequence: Synthetic peptide
VISGSGGTTYYADSVKG

SEQ ID NO: 412 - protein, 14 aa, Artificial Sequence
  Description of Artificial Sequence: Synthetic peptide
LDSSGYYYARGPRY

SEQ ID NO: 413 - protein, 5 aa, Artificial Sequence
  Description of Artificial Sequence: Synthetic peptide
NYGIT

SEQ ID NO: 414 - protein, 17 aa, Artificial Sequence
  Description of Artificial Sequence: Synthetic peptide
WISAYNGNTNYAQKFQG

SEQ ID NO: 415 - protein, 9 aa, Artificial Sequence
  Description of Artificial Sequence: Synthetic peptide
GPYYYYMDV

SEQ ID NO: 416 - protein, 5 aa, Artificial Sequence
  Description of Artificial Sequence: Synthetic peptide
NHGMS

SEQ ID NO: 417 - protein, 16 aa, Artificial Sequence
  Description of Artificial Sequence: Synthetic peptide
GIVYSGSTYYAASVKG

SEQ ID NO: 418 - protein, 7 aa, Artificial Sequence
  Description of Artificial Sequence: Synthetic peptide
HGGESDV

SEQ ID NO: 419 - protein, 5 aa, Artificial Sequence
  Description of Artificial Sequence: Synthetic peptide
NHGMS

SEQ ID NO: 420 - protein, 16 aa, Artificial Sequence
  Description of Artificial Sequence: Synthetic peptide
GIVYSGSTYYAASVKG

SEQ ID NO: 421 - protein, 7 aa, Artificial Sequence
  Description of Artificial Sequence: Synthetic peptide
HGGESDV

SEQ ID NO: 422 - protein, 5 aa, Artificial Sequence
  Description of Artificial Sequence: Synthetic peptide
NHGMS

SEQ ID NO: 423 - protein, 16 aa, Artificial Sequence
  Description of Artificial Sequence: Synthetic peptide
GIVYSGSTYYAASVKG

SEQ ID NO: 424 - protein, 7 aa, Artificial Sequence
  Description of Artificial Sequence: Synthetic peptide
HGGESDV

SEQ ID NO: 425 - protein, 5 aa, Artificial Sequence
  Description of Artificial Sequence: Synthetic peptide
DYYMS

SEQ ID NO: 426 - protein, 17 aa, Artificial Sequence
  Description of Artificial Sequence: Synthetic peptide
YISSSGSTIYYADSVKG

SEQ ID NO: 427 - protein, 8 aa, Artificial Sequence
  Description of Artificial Sequence: Synthetic peptide
ESGDGMDV

SEQ ID NO: 428 - protein, 5 aa, Artificial Sequence
  Description of Artificial Sequence: Synthetic peptide
DYYMS

SEQ ID NO: 429 - protein, 17 aa, Artificial Sequence
  Description of Artificial Sequence: Synthetic peptide
YISSSGNTIYYADSVKG

SEQ ID NO: 430 - protein, 8 aa, Artificial Sequence
  Description of Artificial Sequence: Synthetic peptide
STMVREDY

SEQ ID NO: 431 - protein, 5 aa, Artificial Sequence
  Description of Artificial Sequence: Synthetic peptide
NHGMS

SEQ ID NO: 432 - protein, 16 aa, Artificial Sequence
  Description of Artificial Sequence: Synthetic peptide
GIVYSGSTYYAASVKG

SEQ ID NO: 433 - protein, 7 aa, Artificial Sequence
  Description of Artificial Sequence: Synthetic peptide
HGGESDV

SEQ ID NO: 434 - protein, 5 aa, Artificial Sequence
  Description of Artificial Sequence: Synthetic peptide
NHGMS

SEQ ID NO: 435 - protein, 16 aa, Artificial Sequence
  Description of Artificial Sequence: Synthetic peptide
GIVYSGSTYYAASVKG

SEQ ID NO: 436 - protein, 7 aa, Artificial Sequence
  Description of Artificial Sequence: Synthetic peptide
HGGESDV

SEQ ID NO: 437 - protein, 5 aa, Artificial Sequence
  Description of Artificial Sequence: Synthetic peptide
NHGMS

SEQ ID NO: 438 - protein, 16 aa, Artificial Sequence
  Description of Artificial Sequence: Synthetic peptide
GIVYSGSTYYAASVKG

SEQ ID NO: 439 - protein, 7 aa, Artificial Sequence
  Description of Artificial Sequence: Synthetic peptide
HGGESDV

SEQ ID NO: 440 - protein, 7 aa, Artificial Sequence
  Description of Artificial Sequence: Synthetic peptide
SSYYYWG

SEQ ID NO: 441 - protein, 16 aa, Artificial Sequence
  Description of Artificial Sequence: Synthetic peptide
SIYYSGSAYYNPSLKS

SEQ ID NO: 442 - protein, 11 aa, Artificial Sequence
  Description of Artificial Sequence: Synthetic peptide
HWQEWPDAFDI

SEQ ID NO: 443 - protein, 7 aa, Artificial Sequence
  Description of Artificial Sequence: Synthetic peptide
TSGMCVS

SEQ ID NO: 444 - protein, 16 aa, Artificial Sequence
  Description of Artificial Sequence: Synthetic peptide
RIDWDEDKFYSTSLKT

SEQ ID NO: 445 - protein, 13 aa, Artificial Sequence
  Description of Artificial Sequence: Synthetic peptide
SGAGGTSATAFDI

SEQ ID NO: 446 - protein, 5 aa, Artificial Sequence
  Description of Artificial Sequence: Synthetic peptide
SYSMN

SEQ ID NO: 447 - protein, 17 aa, Artificial Sequence
  Description of Artificial Sequence: Synthetic peptide
SISSSSSYIYYADSVKG

SEQ ID NO: 448 - protein, 10 aa, Artificial Sequence
  Description of Artificial Sequence: Synthetic peptide
TIAAVYAFDI

SEQ ID NO: 449 - protein, 5 aa, Artificial Sequence
  Description of Artificial Sequence: Synthetic peptide
DYYMS

SEQ ID NO: 450 - protein, 17 aa, Artificial Sequence
  Description of Artificial Sequence: Synthetic peptide
YISSSGSTIYYADSVKG

SEQ ID NO: 451 - protein, 8 aa, Artificial Sequence
  Description of Artificial Sequence: Synthetic peptide
DLRGAFDI

SEQ ID NO: 452 - protein, 5 aa, Artificial Sequence
  Description of Artificial Sequence: Synthetic peptide
SHYIH

SEQ ID NO: 453 - protein, 17 aa, Artificial Sequence
  Description of Artificial Sequence: Synthetic peptide
MINPSGGVTAYSQTLQG

SEQ ID NO: 454 - protein, 11 aa, Artificial Sequence
  Description of Artificial Sequence: Synthetic peptide
EGSGSGWYFDF

SEQ ID NO: 455 - protein, 7 aa, Artificial Sequence
  Description of Artificial Sequence: Synthetic peptide
SGGYYWS

SEQ ID NO: 456 - protein, 16 aa, Artificial Sequence
  Description of Artificial Sequence: Synthetic peptide
YIYYSGSTYYNPSLKS

SEQ ID NO: 457 - protein, 13 aa, Artificial Sequence
  Description of Artificial Sequence: Synthetic peptide
AGIAARLRGAFDI

SEQ ID NO: 458 - protein, 5 aa, Artificial Sequence
  Description of Artificial Sequence: Synthetic peptide
SYAIS

SEQ ID NO: 459 - protein, 17 aa, Artificial Sequence
  Description of Artificial Sequence: Synthetic peptide
GIIPIFGTANYAQKFQG

SEQ ID NO: 460 - protein, 20 aa, Artificial Sequence
  Description of Artificial Sequence: Synthetic peptide
RGGYQLLRWDVGLLRSAFDI

SEQ ID NO: 461 - protein, 7 aa, Artificial Sequence
  Description of Artificial Sequence: Synthetic peptide
SNSAAWN

SEQ ID NO: 462 - protein, 18 aa, Artificial Sequence
  Description of Artificial Sequence: Synthetic peptide
RTYYRSKWYSFYAISLKS

SEQ ID NO: 463 - protein, 13 aa, Artificial Sequence
  Description of Artificial Sequence: Synthetic peptide
SSPEGLFLYWFDP

SEQ ID NO: 464 - protein, 5 aa, Artificial Sequence
  Description of Artificial Sequence: Synthetic peptide
SYAMS

SEQ ID NO: 465 - protein, 17 aa, Artificial Sequence
  Description of Artificial Sequence: Synthetic peptide
AISGSGGSTYYADSVKG

SEQ ID NO: 466 - protein, 9 aa, Artificial Sequence
  Description of Artificial Sequence: Synthetic peptide
VEGSGSLDY

SEQ ID NO: 467 - protein, 5 aa, Artificial Sequence
  Description of Artificial Sequence: Synthetic peptide
RYPMS

SEQ ID NO: 468 - protein, 17 aa, Artificial Sequence
  Description of Artificial Sequence: Synthetic peptide
GISDSGVSTYYADSAKG

SEQ ID NO: 469 - protein, 9 aa, Artificial Sequence
  Description of Artificial Sequence: Synthetic peptide
RAGSEASDI

SEQ ID NO: 470 - protein, 5 aa, Artificial Sequence
  Description of Artificial Sequence: Synthetic peptide
SYAMS

SEQ ID NO: 471 - protein, 17 aa, Artificial Sequence
  Description of Artificial Sequence: Synthetic peptide
AISGSGGSTYYADSVKG

SEQ ID NO: 472 - protein, 15 aa, Artificial Sequence
  Description of Artificial Sequence: Synthetic peptide
ATYKRELRYYYGMDV

SEQ ID NO: 473 - protein, 5 aa, Artificial Sequence
  Description of Artificial Sequence: Synthetic peptide
SYAMS

SEQ ID NO: 474 - protein, 17 aa, Artificial Sequence
  Description of Artificial Sequence: Synthetic peptide
AISGSGGSTYYADSVKG

SEQ ID NO: 475 - protein, 15 aa, Artificial Sequence
  Description of Artificial Sequence: Synthetic peptide
ATYKRELRYYYGMDV

SEQ ID NO: 476 - protein, 5 aa, Artificial Sequence
  Description of Artificial Sequence: Synthetic peptide
DYAMH

SEQ ID NO: 477 - protein, 17 aa, Artificial Sequence
  Description of Artificial Sequence: Synthetic peptide
GISWNSGSIGYADSVKG

SEQ ID NO: 478 - protein, 8 aa, Artificial Sequence
  Description of Artificial Sequence: Synthetic peptide
VGKAVPDV

SEQ ID NO: 479 - protein, 5 aa, Artificial Sequence
  Description of Artificial Sequence: Synthetic peptide
DYAMH

SEQ ID NO: 480 - protein, 17 aa, Artificial Sequence
  Description of Artificial Sequence: Synthetic peptide
SINWKGNSLAYGDSVKG

SEQ ID NO: 481 - protein, 13 aa, Artificial Sequence
  Description of Artificial Sequence: Synthetic peptide
HQGVAYYNYAMDV

SEQ ID NO: 482 - protein, 5 aa, Artificial Sequence
  Description of Artificial Sequence: Synthetic peptide
SYAMS

SEQ ID NO: 483 - protein, 17 aa, Artificial Sequence
  Description of Artificial Sequence: Synthetic peptide
AISGSGGSTYYADSVKG

SEQ ID NO: 484 - protein, 8 aa, Artificial Sequence
  Description of Artificial Sequence: Synthetic peptide
VVRDGMDV

SEQ ID NO: 485 - protein, 5 aa, Artificial Sequence
  Description of Artificial Sequence: Synthetic peptide
SYAMS

SEQ ID NO: 486 - protein, 17 aa, Artificial Sequence
  Description of Artificial Sequence: Synthetic peptide
AISGSGGSTYYADSVKG

SEQ ID NO: 487 - protein, 9 aa, Artificial Sequence
  Description of Artificial Sequence: Synthetic peptide
IPQTGTFDY

SEQ ID NO: 488 - protein, 5 aa, Artificial Sequence
  Description of Artificial Sequence: Synthetic peptide
SYAMS

SEQ ID NO: 489 - protein, 17 aa, Artificial Sequence
  Description of Artificial Sequence: Synthetic peptide
AISGSGGSTYYADSVKG

SEQ ID NO: 490 - protein, 15 aa, Artificial Sequence
  Description of Artificial Sequence: Synthetic peptide
ANYKRELRYYYGMDV

SEQ ID NO: 491 - protein, 5 aa, Artificial Sequence
  Description of Artificial Sequence: Synthetic peptide
SYAMS

SEQ ID NO: 492 - protein, 17 aa, Artificial Sequence
  Description of Artificial Sequence: Synthetic peptide
AISGSGGSTYYADSVKG

SEQ ID NO: 493 - protein, 11 aa, Artificial Sequence
  Description of Artificial Sequence: Synthetic peptide
ALVGATGAFDI

SEQ ID NO: 494 - protein, 5 aa, Artificial Sequence
  Description of Artificial Sequence: Synthetic peptide
SYAMS

SEQ ID NO: 495 - protein, 17 aa, Artificial Sequence
  Description of Artificial Sequence: Synthetic peptide
AISGSGGSTYYADSVKG

SEQ ID NO: 496 - protein, 8 aa, Artificial Sequence
  Description of Artificial Sequence: Synthetic peptide
WFGEGFDP

SEQ ID NO: 497 - protein, 5 aa, Artificial Sequence
  Description of Artificial Sequence: Synthetic peptide
SYAMS

SEQ ID NO: 498 - protein, 17 aa, Artificial Sequence
  Description of Artificial Sequence: Synthetic peptide
AISGSGGSTYYADSVKG

SEQ ID NO: 499 - protein, 17 aa, Artificial Sequence
  Description of Artificial Sequence: Synthetic peptide
VGYDSSGYYRDYYGMDV

SEQ ID NO: 500 - protein, 5 aa, Artificial Sequence
  Description of Artificial Sequence: Synthetic peptide
SYAMS

SEQ ID NO: 501 - protein, 17 aa, Artificial Sequence
  Description of Artificial Sequence: Synthetic peptide
AISGSGGSTYYADSVKG

SEQ ID NO: 502 - protein, 13 aa, Artificial Sequence
  Description of Artificial Sequence: Synthetic peptide
MGWSSGYLGAFDI

SEQ ID NO: 503 - protein, 5 aa, Artificial Sequence
  Description of Artificial Sequence: Synthetic peptide
NFGMN

SEQ ID NO: 504 - protein, 17 aa, Artificial Sequence
  Description of Artificial Sequence: Synthetic peptide
WINTYTGESYFADDFKG

SEQ ID NO: 505 - protein, 13 aa, Artificial Sequence
  Description of Artificial Sequence: Synthetic peptide
GEIYYGYDGGFAY

SEQ ID NO: 506 - protein, 5 aa, Artificial Sequence
  Description of Artificial Sequence: Synthetic peptide
DYSIN

SEQ ID NO: 507 - protein, 17 aa, Artificial Sequence
  Description of Artificial Sequence: Synthetic peptide
WINTETREPAYAYDFRG

SEQ ID NO: 508 - protein, 8 aa, Artificial Sequence
  Description of Artificial Sequence: Synthetic peptide
DYSYAMDY

SEQ ID NO: 509 - protein, 5 aa, Artificial Sequence
  Description of Artificial Sequence: Synthetic peptide
HYSMN

SEQ ID NO: 510 - protein, 17 aa, Artificial Sequence
  Description of Artificial Sequence: Synthetic peptide
RINTESGVPIYADDFKG

SEQ ID NO: 511 - protein, 8 aa, Artificial Sequence
  Description of Artificial Sequence: Synthetic peptide
DYLYSLDF

SEQ ID NO: 512 - protein, 5 aa, Artificial Sequence
  Description of Artificial Sequence: Synthetic peptide
HYSMN

SEQ ID NO: 513 - protein, 17 aa, Artificial Sequence
  Description of Artificial Sequence: Synthetic peptide
RINTETGEPLYADDFKG

SEQ ID NO: 514 - protein, 8 aa, Artificial Sequence
  Description of Artificial Sequence: Synthetic peptide
DYLYSCDY

SEQ ID NO: 515 - protein, 11 aa, Artificial Sequence
  Description of Artificial Sequence: Synthetic peptide
RASQSISSYLN

SEQ ID NO: 516 - protein, 7 aa, Artificial Sequence
  Description of Artificial Sequence: Synthetic peptide
AASSLQS

SEQ ID NO: 517 - protein, 9 aa, Artificial Sequence
  Description of Artificial Sequence: Synthetic peptide
QQSYSTPYT

SEQ ID NO: 518 - protein, 12 aa, Artificial Sequence
  Description of Artificial Sequence: Synthetic peptide
RASQSISSSFLA

SEQ ID NO: 519 - protein, 7 aa, Artificial Sequence
  Description of Artificial Sequence: Synthetic peptide
GASRRAT

SEQ ID NO: 520 - protein, 10 aa, Artificial Sequence
  Description of Artificial Sequence: Synthetic peptide
QQYHSSPSWT

SEQ ID NO: 521 - protein, 16 aa, Artificial Sequence
  Description of Artificial Sequence: Synthetic peptide
RSSQSLLHSNGYNYLD

SEQ ID NO: 522 - protein, 7 aa, Artificial Sequence
  Description of Artificial Sequence: Synthetic peptide
LGSNRAS

SEQ ID NO: 523 - protein, 9 aa, Artificial Sequence
  Description of Artificial Sequence: Synthetic peptide
MQALQTPYT

SEQ ID NO: 524 - protein, 16 aa, Artificial Sequence
  Description of Artificial Sequence: Synthetic peptide
KSSQSLLRNDGKTPLY

SEQ ID NO: 525 - protein, 7 aa, Artificial Sequence
  Description of Artificial Sequence: Synthetic peptide
EVSNRFS

SEQ ID NO: 526 - protein, 8 aa, Artificial Sequence
  Description of Artificial Sequence: Synthetic peptide
MQNIQFPS

SEQ ID NO: 527 - protein, 16 aa, Artificial Sequence
  Description of Artificial Sequence: Synthetic peptide
RSSQSLLHSNGYNYLN

SEQ ID NO: 528 - protein, 7 aa, Artificial Sequence
  Description of Artificial Sequence: Synthetic peptide
LGSKRAS

SEQ ID NO: 529 - protein, 9 aa, Artificial Sequence
  Description of Artificial Sequence: Synthetic peptide
MQALQTPYT

SEQ ID NO: 530 - protein, 11 aa, Artificial Sequence
  Description of Artificial Sequence: Synthetic peptide
RASQSISSYLN

SEQ ID NO: 531 - protein, 7 aa, Artificial Sequence
  Description of Artificial Sequence: Synthetic peptide
GASTLAS

SEQ ID NO: 532 - protein, 8 aa, Artificial Sequence
  Description of Artificial Sequence: Synthetic peptide
QQSYKRAS

SEQ ID NO: 533 - protein, 16 aa, Artificial Sequence
  Description of Artificial Sequence: Synthetic peptide
RSSQSLLYSNGYNYVD

SEQ ID NO: 534 - protein, 7 aa, Artificial Sequence
  Description of Artificial Sequence: Synthetic peptide
LGSNRAS

SEQ ID NO: 535 - protein, 9 aa, Artificial Sequence
  Description of Artificial Sequence: Synthetic peptide
MQGRQFPYS

SEQ ID NO: 536 - protein, 11 aa, Artificial Sequence
  Description of Artificial Sequence: Synthetic peptide
RASQSVSSNLA

SEQ ID NO: 537 - protein, 7 aa, Artificial Sequence
  Description of Artificial Sequence: Synthetic peptide
GASTRAS

SEQ ID NO: 538 - protein, 8 aa, Artificial Sequence
  Description of Artificial Sequence: Synthetic peptide
QQYGSSLT

SEQ ID NO: 539 - protein, 11 aa, Artificial Sequence
  Description of Artificial Sequence: Synthetic peptide
RASQSVSSKLA

SEQ ID NO: 540 - protein, 7 aa, Artificial Sequence
  Description of Artificial Sequence: Synthetic peptide
GASIRAT

SEQ ID NO: 541 - protein, 9 aa, Artificial Sequence
  Description of Artificial Sequence: Synthetic peptide
QQYGSSSWT

SEQ ID NO: 542 - protein, 12 aa, Artificial Sequence
  Description of Artificial Sequence: Synthetic peptide
RASQSVGSTNLA

SEQ ID NO: 543 - protein, 7 aa, Artificial Sequence
  Description of Artificial Sequence: Synthetic peptide
DASNRAT

SEQ ID NO: 544 - protein, 10 aa, Artificial Sequence
  Description of Artificial Sequence: Synthetic peptide
QQYGSSPPWT

SEQ ID NO: 545 - protein, 11 aa, Artificial Sequence
  Description of Artificial Sequence: Synthetic peptide
RASQSISSYLN

SEQ ID NO: 546 - protein, 7 aa, Artificial Sequence
  Description of Artificial Sequence: Synthetic peptide
AASSLQS

SEQ ID NO: 547 - protein, 7 aa, Artificial Sequence
  Description of Artificial Sequence: Synthetic peptide
QQSYTLA

SEQ ID NO: 548 - protein, 16 aa, Artificial Sequence
  Description of Artificial Sequence: Synthetic peptide
KSSESLVHNSGKTYLN

SEQ ID NO: 549 - protein, 7 aa, Artificial Sequence
  Description of Artificial Sequence: Synthetic peptide
EVSNRDS

SEQ ID NO: 550 - protein, 9 aa, Artificial Sequence
  Description of Artificial Sequence: Synthetic peptide
MQGTHWPGT

SEQ ID NO: 551 - protein, 11 aa, Artificial Sequence
  Description of Artificial Sequence: Synthetic peptide
QASEDINKFLN

SEQ ID NO: 552 - protein, 7 aa, Artificial Sequence
  Description of Artificial Sequence: Synthetic peptide
DASTLQT

SEQ ID NO: 553 - protein, 9 aa, Artificial Sequence
  Description of Artificial Sequence: Synthetic peptide
QQYESLPLT

SEQ ID NO: 554 - protein, 11 aa, Artificial Sequence
  Description of Artificial Sequence: Synthetic peptide
RASQSVGSNLA

SEQ ID NO: 555 - protein, 7 aa, Artificial Sequence
  Description of Artificial Sequence: Synthetic peptide
GASTRAT

SEQ ID NO: 556 - protein, 10 aa, Artificial Sequence
  Description of Artificial Sequence: Synthetic peptide
QQYNDWLPVT

SEQ ID NO: 557 - protein, 12 aa, Artificial Sequence
  Description of Artificial Sequence: Synthetic peptide
RASQSIGSSSLA

SEQ ID NO: 558 - protein, 7 aa, Artificial Sequence
  Description of Artificial Sequence: Synthetic peptide
GASSRAS

SEQ ID NO: 559 - protein, 10 aa, Artificial Sequence
  Description of Artificial Sequence: Synthetic peptide
QQYAGSPPFT

SEQ ID NO: 560 - protein, 11 aa, Artificial Sequence
  Description of Artificial Sequence: Synthetic peptide
KASQDIDDAMN

SEQ ID NO: 561 - protein, 7 aa, Artificial Sequence
  Description of Artificial Sequence: Synthetic peptide
SATSPVP

SEQ ID NO: 562 - protein, 9 aa, Artificial Sequence
  Description of Artificial Sequence: Synthetic peptide
LQHDNFPLT

SEQ ID NO: 563 - protein, 11 aa, Artificial Sequence
  Description of Artificial Sequence: Synthetic peptide
RASQDIYNNLA

SEQ ID NO: 564 - protein, 7 aa, Artificial Sequence
  Description of Artificial Sequence: Synthetic peptide
AANKSQS

SEQ ID NO: 565 - protein, 9 aa, Artificial Sequence
  Description of Artificial Sequence: Synthetic peptide
QHYYRFPYS

SEQ ID NO: 566 - protein, 16 aa, Artificial Sequence
  Description of Artificial Sequence: Synthetic peptide
RSSQSLLHSNGYNYLD

SEQ ID NO: 567 - protein, 7 aa, Artificial Sequence
  Description of Artificial Sequence: Synthetic peptide
LGSNRAS

SEQ ID NO: 568 - protein, 9 aa, Artificial Sequence
  Description of Artificial Sequence: Synthetic peptide
MQALQTPYT

SEQ ID NO: 569 - protein, 11 aa, Artificial Sequence
  Description of Artificial Sequence: Synthetic peptide
GGNNIGTKSVH

SEQ ID NO: 570 - protein, 7 aa, Artificial Sequence
  Description of Artificial Sequence: Synthetic peptide
DDSVRPS

SEQ ID NO: 571 - protein, 11 aa, Artificial Sequence
  Description of Artificial Sequence: Synthetic peptide
QVWDSDSEHVV

SEQ ID NO: 572 - protein, 11 aa, Artificial Sequence
  Description of Artificial Sequence: Synthetic peptide
SGDGLSKKYVS

SEQ ID NO: 573 - protein, 7 aa, Artificial Sequence
  Description of Artificial Sequence: Synthetic peptide
RDKERPS

SEQ ID NO: 574 - protein, 9 aa, Artificial Sequence
  Description of Artificial Sequence: Synthetic peptide
QAWDDTTVV

SEQ ID NO: 575 - protein, 11 aa, Artificial Sequence
  Description of Artificial Sequence: Synthetic peptide
RASQGIRNWLA

SEQ ID NO: 576 - protein, 7 aa, Artificial Sequence
  Description of Artificial Sequence: Synthetic peptide
AASNLQS

SEQ ID NO: 577 - protein, 9 aa, Artificial Sequence
  Description of Artificial Sequence: Synthetic peptide
QKYNSAPFT

SEQ ID NO: 578 - protein, 11 aa, Artificial Sequence
  Description of Artificial Sequence: Synthetic peptide
GGNNIGSKSVH

SEQ ID NO: 579 - protein, 7 aa, Artificial Sequence
  Description of Artificial Sequence: Synthetic peptide
GKNNRPS

SEQ ID NO: 580 - protein, 12 aa, Artificial Sequence
  Description of Artificial Sequence: Synthetic peptide
SSRDSSGDHLRV

SEQ ID NO: 581 - protein, 11 aa, Artificial Sequence
  Description of Artificial Sequence: Synthetic peptide
QGDSLGNYYAT

SEQ ID NO: 582 - protein, 7 aa, Artificial Sequence
  Description of Artificial Sequence: Synthetic peptide
GTNNRPS

SEQ ID NO: 583 - protein, 11 aa, Artificial Sequence
  Description of Artificial Sequence: Synthetic peptide
NSRDSSGHHLL

SEQ ID NO: 584 - protein, 12 aa, Artificial Sequence
  Description of Artificial Sequence: Synthetic peptide
RASQSVSSAYLA

SEQ ID NO: 585 - protein, 7 aa, Artificial Sequence
  Description of Artificial Sequence: Synthetic peptide
GASTRAT

SEQ ID NO: 586 - protein, 14 aa, Artificial Sequence
  Description of Artificial Sequence: Synthetic peptide
QHYGSSFNGSSLFT

SEQ ID NO: 587 - protein, 11 aa, Artificial Sequence
  Description of Artificial Sequence: Synthetic peptide
RASQSVSNSLA

SEQ ID NO: 588 - protein, 7 aa, Artificial Sequence
  Description of Artificial Sequence: Synthetic peptide
DASSRAT

SEQ ID NO: 589 - protein, 10 aa, Artificial Sequence
  Description of Artificial Sequence: Synthetic peptide
QQFGTSSGLT

SEQ ID NO: 590 - protein, 12 aa, Artificial Sequence
  Description of Artificial Sequence: Synthetic peptide
RASQSVSSSFLA

SEQ ID NO: 591 - protein, 7 aa, Artificial Sequence
  Description of Artificial Sequence: Synthetic peptide
GASSRAT

SEQ ID NO: 592 - protein, 10 aa, Artificial Sequence
  Description of Artificial Sequence: Synthetic peptide
QQYHSSPSWT

SEQ ID NO: 593 - protein, 12 aa, Artificial Sequence
  Description of Artificial Sequence: Synthetic peptide
RASQSVSTTFLA

SEQ ID NO: 594 - protein, 7 aa, Artificial Sequence
  Description of Artificial Sequence: Synthetic peptide
GSSNRAT

SEQ ID NO: 595 - protein, 10 aa, Artificial Sequence
  Description of Artificial Sequence: Synthetic peptide
QQYHSSPSWT

SEQ ID NO: 596 - protein, 11 aa, Artificial Sequence
  Description of Artificial Sequence: Synthetic peptide
RASQSISSYLN

SEQ ID NO: 597 - protein, 7 aa, Artificial Sequence
  Description of Artificial Sequence: Synthetic peptide
AASSLQS

SEQ ID NO: 598 - protein, 9 aa, Artificial Sequence
  Description of Artificial Sequence: Synthetic peptide
QQSYSTPYS

SEQ ID NO: 599 - protein, 12 aa, Artificial Sequence
  Description of Artificial Sequence: Synthetic peptide
RATQSIGSSFLA

SEQ ID NO: 600 - protein, 10 aa, Artificial Sequence
  Description of Artificial Sequence: Synthetic peptide
QQYGSPPRFT

SEQ ID NO: 601 - protein, 12 aa, Artificial Sequence
  Description of Artificial Sequence: Synthetic peptide
RASQSVSSSYLA

SEQ ID NO: 602 - protein, 7 aa, Artificial Sequence
  Description of Artificial Sequence: Synthetic peptide
GASSRAT

SEQ ID NO: 603 - protein, 10 aa, Artificial Sequence
  Description of Artificial Sequence: Synthetic peptide
QHYGSSPSWT

SEQ ID NO: 604 - protein, 12 aa, Artificial Sequence
  Description of Artificial Sequence: Synthetic peptide
RASQRVASNYLA

SEQ ID NO: 605 - protein, 7 aa, Artificial Sequence
  Description of Artificial Sequence: Synthetic peptide
GASSRAT

SEQ ID NO: 606 - protein, 10 aa, Artificial Sequence
  Description of Artificial Sequence: Synthetic peptide
QHYDSSPSWT

SEQ ID NO: 607 - protein, 12 aa, Artificial Sequence
  Description of Artificial Sequence: Synthetic peptide
RASQSLSSNFLA

SEQ ID NO: 608 - protein, 7 aa, Artificial Sequence
  Description of Artificial Sequence: Synthetic peptide
GASNWAT

SEQ ID NO: 609 - protein, 10 aa, Artificial Sequence
  Description of Artificial Sequence: Synthetic peptide
QYYGTSPMYT

SEQ ID NO: 610 - protein, 16 aa, Artificial Sequence
  Description of Artificial Sequence: Synthetic peptide
RSSQSLLHSNGYNYLD

SEQ ID NO: 611 - protein, 7 aa, Artificial Sequence
  Description of Artificial Sequence: Synthetic peptide
LGSNRAS

SEQ ID NO: 612 - protein, 9 aa, Artificial Sequence
  Description of Artificial Sequence: Synthetic peptide
MQALQTPLT

SEQ ID NO: 613 - protein, 12 aa, Artificial Sequence
  Description of Artificial Sequence: Synthetic peptide
RASQSVSSSYLA

SEQ ID NO: 614 - protein, 7 aa, Artificial Sequence
  Description of Artificial Sequence: Synthetic peptide
GTSSRAT

SEQ ID NO: 615 - protein, 11 aa, Artificial Sequence
  Description of Artificial Sequence: Synthetic peptide
QHYGNSPPKFT

SEQ ID NO: 616 - protein, 12 aa, Artificial Sequence
  Description of Artificial Sequence: Synthetic peptide
RASQSVASSFLA

SEQ ID NO: 617 - protein, 7 aa, Artificial Sequence
  Description of Artificial Sequence: Synthetic peptide
GASGRAT

SEQ ID NO: 618 - protein, 10 aa, Artificial Sequence
  Description of Artificial Sequence: Synthetic peptide
QHYGGSPRLT

SEQ ID NO: 619 - protein, 11 aa, Artificial Sequence
  Description of Artificial Sequence: Synthetic peptide
RASQDVNTAVS

SEQ ID NO: 620 - protein, 7 aa, Artificial Sequence
  Description of Artificial Sequence: Synthetic peptide
SASYRYT

SEQ ID NO: 621 - protein, 9 aa, Artificial Sequence
  Description of Artificial Sequence: Synthetic peptide
QQHYSTPWT

SEQ ID NO: 622 - protein, 15 aa, Artificial Sequence
  Description of Artificial Sequence: Synthetic peptide
RASESVSVIGAHLIH

SEQ ID NO: 623 - protein, 7 aa, Artificial Sequence
  Description of Artificial Sequence: Synthetic peptide
LASNLET

SEQ ID NO: 624 - protein, 9 aa, Artificial Sequence
  Description of Artificial Sequence: Synthetic peptide
LQSRIFPRT

SEQ ID NO: 625 - protein, 15 aa, Artificial Sequence
  Description of Artificial Sequence: Synthetic peptide
RASESVTILGSHLIY

SEQ ID NO: 626 - protein, 7 aa, Artificial Sequence
  Description of Artificial Sequence: Synthetic peptide
LASNVQT

SEQ ID NO: 627 - protein, 9 aa, Artificial Sequence
  Description of Artificial Sequence: Synthetic peptide
LQSRTIPRT

SEQ ID NO: 628 - protein, 15 aa, Artificial Sequence
  Description of Artificial Sequence: Synthetic peptide
RASESVTILGSHLIY

SEQ ID NO: 629 - protein, 7 aa, Artificial Sequence
  Description of Artificial Sequence: Synthetic peptide
LASNVQT

SEQ ID NO: 630 - protein, 9 aa, Artificial Sequence
  Description of Artificial Sequence: Synthetic peptide
LQSRTIPRT

SEQ ID NO: 631 - protein, 7 aa, Artificial Sequence
  Description of Artificial Sequence: Synthetic peptide
GFALSNH

SEQ ID NO: 632 - protein, 5 aa, Artificial Sequence
  Description of Artificial Sequence: Synthetic peptide
VYSGS

SEQ ID NO: 633 - protein, 7 aa, Artificial Sequence
  Description of Artificial Sequence: Synthetic peptide
HGGESDV

SEQ ID NO: 634 - protein, 7 aa, Artificial Sequence
  Description of Artificial Sequence: Synthetic peptide
GFTFSNY

SEQ ID NO: 635 - protein, 6 aa, Artificial Sequence
  Description of Artificial Sequence: Synthetic peptide
SRSGEN

SEQ ID NO: 636 - protein, 11 aa, Artificial Sequence
  Description of Artificial Sequence: Synthetic peptide
SPAHYYGGMDV

SEQ ID NO: 637 - protein, 7 aa, Artificial Sequence
  Description of Artificial Sequence: Synthetic peptide
GFTFDDY

SEQ ID NO: 638 - protein, 6 aa, Artificial Sequence
  Description of Artificial Sequence: Synthetic peptide
SWNSGS

SEQ ID NO: 639 - protein, 6 aa, Artificial Sequence
  Description of Artificial Sequence: Synthetic peptide
HSFLAY

SEQ ID NO: 640 - protein, 7 aa, Artificial Sequence
  Description of Artificial Sequence: Synthetic peptide
GFALSNH

SEQ ID NO: 641 - protein, 5 aa, Artificial Sequence
  Description of Artificial Sequence: Synthetic peptide
VYSGS

SEQ ID NO: 642 - protein, 7 aa, Artificial Sequence
  Description of Artificial Sequence: Synthetic peptide
HGGESDV

SEQ ID NO: 643 - protein, 7 aa, Artificial Sequence
  Description of Artificial Sequence: Synthetic peptide
GYIFDNF

SEQ ID NO: 644 - protein, 6 aa, Artificial Sequence
  Description of Artificial Sequence: Synthetic peptide
NPKNNN

SEQ ID NO: 645 - protein, 11 aa, Artificial Sequence
  Description of Artificial Sequence: Synthetic peptide
GPYYYQSYMDV

SEQ ID NO: 646 - protein, 7 aa, Artificial Sequence
  Description of Artificial Sequence: Synthetic peptide
GFTFSSD

SEQ ID NO: 647 - protein, 6 aa, Artificial Sequence
  Description of Artificial Sequence: Synthetic peptide
SGSGGT

SEQ ID NO: 648 - protein, 14 aa, Artificial Sequence
  Description of Artificial Sequence: Synthetic peptide
LDSSGYYYARGPRY

SEQ ID NO: 649 - protein, 7 aa, Artificial Sequence
  Description of Artificial Sequence: Synthetic peptide
GYTFSNY

SEQ ID NO: 650 - protein, 6 aa, Artificial Sequence
  Description of Artificial Sequence: Synthetic peptide
SAYNGN

SEQ ID NO: 651 - protein, 9 aa, Artificial Sequence
  Description of Artificial Sequence: Synthetic peptide
GPYYYYMDV

SEQ ID NO: 652 - protein, 7 aa, Artificial Sequence
  Description of Artificial Sequence: Synthetic peptide
GFALSNH

SEQ ID NO: 653 - protein, 5 aa, Artificial Sequence
  Description of Artificial Sequence: Synthetic peptide
VYSGS

SEQ ID NO: 654 - protein, 7 aa, Artificial Sequence
  Description of Artificial Sequence: Synthetic peptide
HGGESDV

SEQ ID NO: 655 - protein, 7 aa, Artificial Sequence
  Description of Artificial Sequence: Synthetic peptide
GFALSNH

SEQ ID NO: 656 - protein, 5 aa, Artificial Sequence
  Description of Artificial Sequence: Synthetic peptide
VYSGS

SEQ ID NO: 657 - protein, 7 aa, Artificial Sequence
  Description of Artificial Sequence: Synthetic peptide
HGGESDV

SEQ ID NO: 658 - protein, 7 aa, Artificial Sequence
  Description of Artificial Sequence: Synthetic peptide
GFALSNH

SEQ ID NO: 659 - protein, 5 aa, Artificial Sequence
  Description of Artificial Sequence: Synthetic peptide
VYSGS

SEQ ID NO: 660 - protein, 7 aa, Artificial Sequence
  Description of Artificial Sequence: Synthetic peptide
HGGESDV

SEQ ID NO: 661 - protein, 7 aa, Artificial Sequence
  Description of Artificial Sequence: Synthetic peptide
GFTFSDY

SEQ ID NO: 662 - protein, 6 aa, Artificial Sequence
  Description of Artificial Sequence: Synthetic peptide
SSSGST

SEQ ID NO: 663 - protein, 8 aa, Artificial Sequence
  Description of Artificial Sequence: Synthetic peptide
ESGDGMDV

SEQ ID NO: 664 - protein, 7 aa, Artificial Sequence
  Description of Artificial Sequence: Synthetic peptide
GFTFSDY

SEQ ID NO: 665 - protein, 6 aa, Artificial Sequence
  Description of Artificial Sequence: Synthetic peptide
SSSGNT

SEQ ID NO: 666 - protein, 8 aa, Artificial Sequence
  Description of Artificial Sequence: Synthetic peptide
STMVREDY

SEQ ID NO: 667 - protein, 7 aa, Artificial Sequence
  Description of Artificial Sequence: Synthetic peptide
GFALSNH

SEQ ID NO: 668 - protein, 5 aa, Artificial Sequence
  Description of Artificial Sequence: Synthetic peptide
VYSGS

SEQ ID NO: 669 - protein, 7 aa, Artificial Sequence
  Description of Artificial Sequence: Synthetic peptide
HGGESDV

SEQ ID NO: 670 - protein, 7 aa, Artificial Sequence
  Description of Artificial Sequence: Synthetic peptide
GFALSNH

SEQ ID NO: 671 - protein, 5 aa, Artificial Sequence
  Description of Artificial Sequence: Synthetic peptide
VYSGS

SEQ ID NO: 672 - protein, 7 aa, Artificial Sequence
  Description of Artificial Sequence: Synthetic peptide
HGGESDV

SEQ ID NO: 673 - protein, 7 aa, Artificial Sequence
  Description of Artificial Sequence: Synthetic peptide
GFALSNH

SEQ ID NO: 674 - protein, 5 aa, Artificial Sequence
  Description of Artificial Sequence: Synthetic peptide
VYSGS

SEQ ID NO: 675 - protein, 7 aa, Artificial Sequence
  Description of Artificial Sequence: Synthetic peptide
HGGESDV

SEQ ID NO: 676 - protein, 9 aa, Artificial Sequence
  Description of Artificial Sequence: Synthetic peptide
GGSISSSYY

SEQ ID NO: 677 - protein, 5 aa, Artificial Sequence
  Description of Artificial Sequence: Synthetic peptide
YYSGS

SEQ ID NO: 678 - protein, 11 aa, Artificial Sequence
  Description of Artificial Sequence: Synthetic peptide
HWQEWPDAFDI

SEQ ID NO: 679 - protein, 9 aa, Artificial Sequence
  Description of Artificial Sequence: Synthetic peptide
GFSLRTSGM

SEQ ID NO: 680 - protein, 5 aa, Artificial Sequence
  Description of Artificial Sequence: Synthetic peptide
DWDED

SEQ ID NO: 681 - protein, 13 aa, Artificial Sequence
  Description of Artificial Sequence: Synthetic peptide
SGAGGTSATAFDI

SEQ ID NO: 682 - protein, 7 aa, Artificial Sequence
  Description of Artificial Sequence: Synthetic peptide
GFTFSSY

SEQ ID NO: 683 - protein, 6 aa, Artificial Sequence
  Description of Artificial Sequence: Synthetic peptide
SSSSSY

SEQ ID NO: 684 - protein, 10 aa, Artificial Sequence
  Description of Artificial Sequence: Synthetic peptide
TIAAVYAFDI

SEQ ID NO: 685 - protein, 7 aa, Artificial Sequence
  Description of Artificial Sequence: Synthetic peptide
GFTFSDY

SEQ ID NO: 686 - protein, 6 aa, Artificial Sequence
  Description of Artificial Sequence: Synthetic peptide
SSSGST

SEQ ID NO: 687 - protein, 8 aa, Artificial Sequence
  Description of Artificial Sequence: Synthetic peptide
DLRGAFDI

SEQ ID NO: 688 - protein, 7 aa, Artificial Sequence
  Description of Artificial Sequence: Synthetic peptide
GYTVTSH

SEQ ID NO: 689 - protein, 6 aa, Artificial Sequence
  Description of Artificial Sequence: Synthetic peptide
NPSGGV

SEQ ID NO: 690 - protein, 11 aa, Artificial Sequence
  Description of Artificial Sequence: Synthetic peptide
EGSGSGWYFDF

SEQ ID NO: 691 - protein, 9 aa, Artificial Sequence
  Description of Artificial Sequence: Synthetic peptide
GGSISSGGY

SEQ ID NO: 692 - protein, 5 aa, Artificial Sequence
  Description of Artificial Sequence: Synthetic peptide
YYSGS

SEQ ID NO: 693 - protein, 13 aa, Artificial Sequence
  Description of Artificial Sequence: Synthetic peptide
AGIAARLRGAFDI

SEQ ID NO: 694 - protein, 7 aa, Artificial Sequence
  Description of Artificial Sequence: Synthetic peptide
GGTFSSY

SEQ ID NO: 695 - protein, 6 aa, Artificial Sequence
  Description of Artificial Sequence: Synthetic peptide
IPIFGT

SEQ ID NO: 696 - protein, 20 aa, Artificial Sequence
  Description of Artificial Sequence: Synthetic peptide
RGGYQLLRWDVGLLRSAFDI

SEQ ID NO: 697 - protein, 9 aa, Artificial Sequence
  Description of Artificial Sequence: Synthetic peptide
GDSVSSNSA

SEQ ID NO: 698 - protein, 7 aa, Artificial Sequence
  Description of Artificial Sequence: Synthetic peptide
YYRSKWY

SEQ ID NO: 699 - protein, 13 aa, Artificial Sequence
  Description of Artificial Sequence: Synthetic peptide
SSPEGLFLYWFDP

SEQ ID NO: 700 - protein, 7 aa, Artificial Sequence
  Description of Artificial Sequence: Synthetic peptide
GFTFSSY

SEQ ID NO: 701 - protein, 6 aa, Artificial Sequence
  Description of Artificial Sequence: Synthetic peptide
SGSGGS

SEQ ID NO: 702 - protein, 9 aa, Artificial Sequence
  Description of Artificial Sequence: Synthetic peptide
VEGSGSLDY

SEQ ID NO: 703 - protein, 7 aa, Artificial Sequence
  Description of Artificial Sequence: Synthetic peptide
GITFSRY

SEQ ID NO: 704 - protein, 6 aa, Artificial Sequence
  Description of Artificial Sequence: Synthetic peptide
SDSGVS

SEQ ID NO: 705 - protein, 9 aa, Artificial Sequence
  Description of Artificial Sequence: Synthetic peptide
RAGSEASDI

SEQ ID NO: 706 - protein, 7 aa, Artificial Sequence
  Description of Artificial Sequence: Synthetic peptide
GFTFSSY

SEQ ID NO: 707 - protein, 6 aa, Artificial Sequence
  Description of Artificial Sequence: Synthetic peptide
SGSGGS

SEQ ID NO: 708 - protein, 15 aa, Artificial Sequence
  Description of Artificial Sequence: Synthetic peptide
ATYKRELRYYYGMDV

SEQ ID NO: 709 - protein, 7 aa, Artificial Sequence
  Description of Artificial Sequence: Synthetic peptide
GFTFSSY

SEQ ID NO: 710 - protein, 6 aa, Artificial Sequence
  Description of Artificial Sequence: Synthetic peptide
SGSGGS

SEQ ID NO: 711 - protein, 15 aa, Artificial Sequence
  Description of Artificial Sequence: Synthetic peptide
ATYKRELRYYYGMDV

SEQ ID NO: 712 - protein, 7 aa, Artificial Sequence
  Description of Artificial Sequence: Synthetic peptide
GFTFDDY

SEQ ID NO: 713 - protein, 6 aa, Artificial Sequence
  Description of Artificial Sequence: Synthetic peptide
SWNSGS

SEQ ID NO: 714 - protein, 8 aa, Artificial Sequence
  Description of Artificial Sequence: Synthetic peptide
VGKAVPDV

SEQ ID NO: 715 - protein, 7 aa, Artificial Sequence
  Description of Artificial Sequence: Synthetic peptide
GFTFDDY

SEQ ID NO: 716 - protein, 6 aa, Artificial Sequence
  Description of Artificial Sequence: Synthetic peptide
NWKGNS

SEQ ID NO: 717 - protein, 13 aa, Artificial Sequence
  Description of Artificial Sequence: Synthetic peptide
HQGVAYYNYAMDV

SEQ ID NO: 718 - protein, 7 aa, Artificial Sequence
  Description of Artificial Sequence: Synthetic peptide
GFTFSSY

SEQ ID NO: 719 - protein, 6 aa, Artificial Sequence
  Description of Artificial Sequence: Synthetic peptide
SGSGGS

SEQ ID NO: 720 - protein, 8 aa, Artificial Sequence
  Description of Artificial Sequence: Synthetic peptide
VVRDGMDV

SEQ ID NO: 721 - protein, 7 aa, Artificial Sequence
  Description of Artificial Sequence: Synthetic peptide
GFTFSSY

SEQ ID NO: 722 - protein, 6 aa, Artificial Sequence
  Description of Artificial Sequence: Synthetic peptide
SGSGGS

SEQ ID NO: 723 - protein, 9 aa, Artificial Sequence
  Description of Artificial Sequence: Synthetic peptide
IPQTGTFDY

SEQ ID NO: 724 - protein, 7 aa, Artificial Sequence
  Description of Artificial Sequence: Synthetic peptide
GFTFSSY

SEQ ID NO: 725 - protein, 6 aa, Artificial Sequence
  Description of Artificial Sequence: Synthetic peptide
SGSGGS

SEQ ID NO: 726 - protein, 15 aa, Artificial Sequence
  Description of Artificial Sequence: Synthetic peptide
ANYKRELRYYYGMDV

SEQ ID NO: 727 - protein, 7 aa, Artificial Sequence
  Description of Artificial Sequence: Synthetic peptide
GFSFSSY

SEQ ID NO: 728 - protein, 6 aa, Artificial Sequence
  Description of Artificial Sequence: Synthetic peptide
SGSGGS

SEQ ID NO: 729 - protein, 11 aa, Artificial Sequence
  Description of Artificial Sequence: Synthetic peptide
ALVGATGAFDI

SEQ ID NO: 730 - protein, 7 aa, Artificial Sequence
  Description of Artificial Sequence: Synthetic peptide
GFTFSSY

SEQ ID NO: 731 - protein, 6 aa, Artificial Sequence
  Description of Artificial Sequence: Synthetic peptide
SGSGGS

SEQ ID NO: 732 - protein, 8 aa, Artificial Sequence
  Description of Artificial Sequence: Synthetic peptide
WFGEGFDP

SEQ ID NO: 733 - protein, 7 aa, Artificial Sequence
  Description of Artificial Sequence: Synthetic peptide
GFTFSSY

SEQ ID NO: 734 - protein, 6 aa, Artificial Sequence
  Description of Artificial Sequence: Synthetic peptide
SGSGGS

SEQ ID NO: 735 - protein, 17 aa, Artificial Sequence
  Description of Artificial Sequence: Synthetic peptide
VGYDSSGYYRDYYGMDV

SEQ ID NO: 736 - protein, 7 aa, Artificial Sequence
  Description of Artificial Sequence: Synthetic peptide
GFTFSSY

SEQ ID NO: 737 - skipped

SEQ ID NO: 738 - protein, 6 aa, Artificial Sequence
  Description of Artificial Sequence: Synthetic peptide
SGSGGS

SEQ ID NO: 739 - protein, 13 aa, Artificial Sequence
  Description of Artificial Sequence: Synthetic peptide
MGWSSGYLGAFDI

SEQ ID NO: 740 - protein, 7 aa, Artificial Sequence
  Description of Artificial Sequence: Synthetic peptide
GYTFTNF

SEQ ID NO: 741 - protein, 6 aa, Artificial Sequence
  Description of Artificial Sequence: Synthetic peptide
NTYTGE

SEQ ID NO: 742 - protein, 13 aa, Artificial Sequence
  Description of Artificial Sequence: Synthetic peptide
GEIYYGYDGGFAY

SEQ ID NO: 743 - protein, 7 aa, Artificial Sequence
  Description of Artificial Sequence: Synthetic peptide
GYTFTDY

SEQ ID NO: 744 - protein, 6 aa, Artificial Sequence
  Description of Artificial Sequence: Synthetic peptide
NTETRE

SEQ ID NO: 745 - protein, 8 aa, Artificial Sequence
  Description of Artificial Sequence: Synthetic peptide
DYSYAMDY

SEQ ID NO: 746 - protein, 7 aa, Artificial Sequence
  Description of Artificial Sequence: Synthetic peptide
GYTFRHY

SEQ ID NO: 747 - protein, 6 aa, Artificial Sequence
  Description of Artificial Sequence: Synthetic peptide
NTESGV

SEQ ID NO: 748 - protein, 8 aa, Artificial Sequence
  Description of Artificial Sequence: Synthetic peptide
DYLYSLDF

SEQ ID NO: 749 - protein, 7 aa, Artificial Sequence
  Description of Artificial Sequence: Synthetic peptide
GYTFTHY

SEQ ID NO: 750 - protein, 6 aa, Artificial Sequence
  Description of Artificial Sequence: Synthetic peptide
NTETGE

SEQ ID NO: 751 - protein, 8 aa, Artificial Sequence
  Description of Artificial Sequence: Synthetic peptide
DYLYSCDY

SEQ ID NO: 752 - protein, 7 aa, Artificial Sequence
  Description of Artificial Sequence: Synthetic peptide
SQSISSY

SEQ ID NO: 753 - protein, 3 aa, Artificial Sequence
  Description of Artificial Sequence: Synthetic peptide
AAS

SEQ ID NO: 754 - protein, 6 aa, Artificial Sequence
  Description of Artificial Sequence: Synthetic peptide
SYSTPY

SEQ ID NO: 755 - protein, 8 aa, Artificial Sequence
  Description of Artificial Sequence: Synthetic peptide
SQSISSSF

SEQ ID NO: 756 - protein, 3 aa, Artificial Sequence
  Description of Artificial Sequence: Synthetic peptide
GAS

SEQ ID NO: 757 - protein, 7 aa, Artificial Sequence
  Description of Artificial Sequence: Synthetic peptide
YHSSPSW

SEQ ID NO: 758 - protein, 12 aa, Artificial Sequence
  Description of Artificial Sequence: Synthetic peptide
SQSLLHSNGYNY

SEQ ID NO: 759 - protein, 3 aa, Artificial Sequence
  Description of Artificial Sequence: Synthetic peptide
LGS

SEQ ID NO: 760 - protein, 6 aa, Artificial Sequence
  Description of Artificial Sequence: Synthetic peptide
ALQTPY

SEQ ID NO: 761 - protein, 12 aa, Artificial Sequence
  Description of Artificial Sequence: Synthetic peptide
SQSLLRNDGKTP

SEQ ID NO: 762 - protein, 3 aa, Artificial Sequence
  Description of Artificial Sequence: Synthetic peptide
EVS

SEQ ID NO: 763 - protein, 5 aa, Artificial Sequence
  Description of Artificial Sequence: Synthetic peptide
NIQFP

SEQ ID NO: 764 - protein, 12 aa, Artificial Sequence
  Description of Artificial Sequence: Synthetic peptide
SQSLLHSNGYNY

SEQ ID NO: 765 - protein, 3 aa, Artificial Sequence
  Description of Artificial Sequence: Synthetic peptide
LGS

SEQ ID NO: 766 - protein, 6 aa, Artificial Sequence
  Description of Artificial Sequence: Synthetic peptide
ALQTPY

SEQ ID NO: 767 - protein, 7 aa, Artificial Sequence
  Description of Artificial Sequence: Synthetic peptide
SQSISSY

SEQ ID NO: 768 - protein, 3 aa, Artificial Sequence
  Description of Artificial Sequence: Synthetic peptide
GAS

SEQ ID NO: 769 - protein, 5 aa, Artificial Sequence
  Description of Artificial Sequence: Synthetic peptide
SYKRA

SEQ ID NO: 770 - protein, 12 aa, Artificial Sequence
  Description of Artificial Sequence: Synthetic peptide
SQSLLYSNGYNY

SEQ ID NO: 771 - protein, 3 aa, Artificial Sequence
  Description of Artificial Sequence: Synthetic peptide
LGS

SEQ ID NO: 772 - protein, 6 aa, Artificial Sequence
  Description of Artificial Sequence: Synthetic peptide
GRQFPY

SEQ ID NO: 773 - protein, 7 aa, Artificial Sequence
  Description of Artificial Sequence: Synthetic peptide
SQSVSSN

SEQ ID NO: 774 - protein, 3 aa, Artificial Sequence
  Description of Artificial Sequence: Synthetic peptide
GAS

SEQ ID NO: 775 - protein, 5 aa, Artificial Sequence
  Description of Artificial Sequence: Synthetic peptide
YGSSL

SEQ ID NO: 776 - protein, 7 aa, Artificial Sequence
  Description of Artificial Sequence: Synthetic peptide
SQSVSSK

SEQ ID NO: 777 - protein, 3 aa, Artificial Sequence
  Description of Artificial Sequence: Synthetic peptide
GAS

SEQ ID NO: 778 - protein, 6 aa, Artificial Sequence
  Description of Artificial Sequence: Synthetic peptide
YGSSSW

SEQ ID NO: 779 - protein, 8 aa, Artificial Sequence
  Description of Artificial Sequence: Synthetic peptide
SQSVGSTN

SEQ ID NO: 780 - protein, 3 aa, Artificial Sequence
  Description of Artificial Sequence: Synthetic peptide
DAS

SEQ ID NO: 781 - protein, 7 aa, Artificial Sequence
  Description of Artificial Sequence: Synthetic peptide
YGSSPPW

SEQ ID NO: 782 - protein, 7 aa, Artificial Sequence
  Description of Artificial Sequence: Synthetic peptide
SQSISSY

SEQ ID NO: 783 - protein, 3 aa, Artificial Sequence
  Description of Artificial Sequence: Synthetic peptide
AAS

SEQ ID NO: 784 - protein, 4 aa, Artificial Sequence
  Description of Artificial Sequence: Synthetic peptide
SYTL

SEQ ID NO: 785 - protein, 12 aa, Artificial Sequence
  Description of Artificial Sequence: Synthetic peptide
SESLVHNSGKTY

SEQ ID NO: 786 - protein, 3 aa, Artificial Sequence
  Description of Artificial Sequence: Synthetic peptide
EVS

SEQ ID NO: 787 - protein, 6 aa, Artificial Sequence
  Description of Artificial Sequence: Synthetic peptide
GTHWPG

SEQ ID NO: 788 - protein, 7 aa, Artificial Sequence
  Description of Artificial Sequence: Synthetic peptide
YAGSPPF

SEQ ID NO: 789 - protein, 7 aa, Artificial Sequence
  Description of Artificial Sequence: Synthetic peptide
SQDIDDA

SEQ ID NO: 790 - protein, 3 aa, Artificial Sequence
  Description of Artificial Sequence: Synthetic peptide
SAT

SEQ ID NO: 791 - protein, 6 aa, Artificial Sequence
  Description of Artificial Sequence: Synthetic peptide
HDNFPL

SEQ ID NO: 792 - protein, 7 aa, Artificial Sequence
  Description of Artificial Sequence: Synthetic peptide
SQDIYNN

SEQ ID NO: 793 - protein, 3 aa, Artificial Sequence
  Description of Artificial Sequence: Synthetic peptide
AAN

SEQ ID NO: 794 - protein, 6 aa, Artificial Sequence
  Description of Artificial Sequence: Synthetic peptide
YYRFPY

SEQ ID NO: 795 - protein, 12 aa, Artificial Sequence
  Description of Artificial Sequence: Synthetic peptide
SQSLLHSNGYNY

SEQ ID NO: 796 - protein, 3 aa, Artificial Sequence
  Description of Artificial Sequence: Synthetic peptide
LGS

SEQ ID NO: 797 - protein, 6 aa, Artificial Sequence
  Description of Artificial Sequence: Synthetic peptide
ALQTPY

SEQ ID NO: 798 - protein, 7 aa, Artificial Sequence
  Description of Artificial Sequence: Synthetic peptide
NNIGTKS

SEQ ID NO: 799 - protein, 3 aa, Artificial Sequence
  Description of Artificial Sequence: Synthetic peptide
DDS

SEQ ID NO: 800 - protein, 8 aa, Artificial Sequence
  Description of Artificial Sequence: Synthetic peptide
WDSDSEHV

SEQ ID NO: 801 - protein, 7 aa, Artificial Sequence
  Description of Artificial Sequence: Synthetic peptide
DGLSKKY

SEQ ID NO: 802 - protein, 3 aa, Artificial Sequence
  Description of Artificial Sequence: Synthetic peptide
RDK

SEQ ID NO: 803 - protein, 6 aa, Artificial Sequence
  Description of Artificial Sequence: Synthetic peptide
WDDTTV

SEQ ID NO: 804 - protein, 7 aa, Artificial Sequence
  Description of Artificial Sequence: Synthetic peptide
SQGIRNW

SEQ ID NO: 805 - protein, 3 aa, Artificial Sequence
  Description of Artificial Sequence: Synthetic peptide
AAS

SEQ ID NO: 806 - protein, 6 aa, Artificial Sequence
  Description of Artificial Sequence: Synthetic peptide
YNSAPF

SEQ ID NO: 807 - protein, 7 aa, Artificial Sequence
  Description of Artificial Sequence: Synthetic peptide
NNIGSKS

SEQ ID NO: 808 - protein, 3 aa, Artificial Sequence
  Description of Artificial Sequence: Synthetic peptide
GKN

SEQ ID NO: 809 - protein, 9 aa, Artificial Sequence
  Description of Artificial Sequence: Synthetic peptide
RDSSGDHLR

SEQ ID NO: 810 - protein, 7 aa, Artificial Sequence
  Description of Artificial Sequence: Synthetic peptide
DSLGNYY

SEQ ID NO: 811 - protein, 3 aa, Artificial Sequence
  Description of Artificial Sequence: Synthetic peptide
GTN

SEQ ID NO: 812 - protein, 8 aa, Artificial Sequence
  Description of Artificial Sequence: Synthetic peptide
RDSSGHHL

SEQ ID NO: 813 - protein, 8 aa, Artificial Sequence
  Description of Artificial Sequence: Synthetic peptide
SQSVSSAY

SEQ ID NO: 814 - protein, 3 aa, Artificial Sequence
  Description of Artificial Sequence: Synthetic peptide
GAS

SEQ ID NO: 815 - protein, 11 aa, Artificial Sequence
  Description of Artificial Sequence: Synthetic peptide
YGSSFNGSSLF

SEQ ID NO: 816 - protein, 7 aa, Artificial Sequence
  Description of Artificial Sequence: Synthetic peptide
SQSVSNS

SEQ ID NO: 817 - protein, 3 aa, Artificial Sequence
  Description of Artificial Sequence: Synthetic peptide
DAS

SEQ ID NO: 818 - protein, 7 aa, Artificial Sequence
  Description of Artificial Sequence: Synthetic peptide
FGTSSGL

SEQ ID NO: 819 - protein, 8 aa, Artificial Sequence
  Description of Artificial Sequence: Synthetic peptide
SQSVSSSF

SEQ ID NO: 820 - protein, 3 aa, Artificial Sequence
  Description of Artificial Sequence: Synthetic peptide
GAS

SEQ ID NO: 821 - protein, 7 aa, Artificial Sequence
  Description of Artificial Sequence: Synthetic peptide
YHSSPSW

SEQ ID NO: 822 - protein, 8 aa, Artificial Sequence
  Description of Artificial Sequence: Synthetic peptide
SQSVSTTF

SEQ ID NO: 823 - protein, 3 aa, Artificial Sequence
  Description of Artificial Sequence: Synthetic peptide
GSS

SEQ ID NO: 824 - protein, 7 aa, Artificial Sequence
  Description of Artificial Sequence: Synthetic peptide
YHSSPSW

SEQ ID NO: 825 - protein, 7 aa, Artificial Sequence
  Description of Artificial Sequence: Synthetic peptide
SQSISSY

SEQ ID NO: 826 - protein, 3 aa, Artificial Sequence
  Description of Artificial Sequence: Synthetic peptide
AAS

SEQ ID NO: 827 - protein, 6 aa, Artificial Sequence
  Description of Artificial Sequence: Synthetic peptide
SYSTPY

SEQ ID NO: 828 - protein, 8 aa, Artificial Sequence
  Description of Artificial Sequence: Synthetic peptide
TQSIGSSF

SEQ ID NO: 829 - protein, 3 aa, Artificial Sequence
  Description of Artificial Sequence: Synthetic peptide
GAS

SEQ ID NO: 830 - protein, 7 aa, Artificial Sequence
  Description of Artificial Sequence: Synthetic peptide
YESSPSW

SEQ ID NO: 831 - protein, 8 aa, Artificial Sequence
  Description of Artificial Sequence: Synthetic peptide
SQSVSSSY

SEQ ID NO: 832 - protein, 3 aa, Artificial Sequence
  Description of Artificial Sequence: Synthetic peptide
GAS

SEQ ID NO: 833 - protein, 7 aa, Artificial Sequence
  Description of Artificial Sequence: Synthetic peptide
YGSPPRF

SEQ ID NO: 834 - protein, 8 aa, Artificial Sequence
  Description of Artificial Sequence: Synthetic peptide
SQSVSSSY

SEQ ID NO: 835 - protein, 3 aa, Artificial Sequence
  Description of Artificial Sequence: Synthetic peptide
GAS

SEQ ID NO: 836 - protein, 7 aa, Artificial Sequence
  Description of Artificial Sequence: Synthetic peptide
YGSSPSW

SEQ ID NO: 837 - protein, 8 aa, Artificial Sequence
  Description of Artificial Sequence: Synthetic peptide
SQRVASNY

SEQ ID NO: 838 - protein, 3 aa, Artificial Sequence
  Description of Artificial Sequence: Synthetic peptide
GAS

SEQ ID NO: 839 - protein, 7 aa, Artificial Sequence
  Description of Artificial Sequence: Synthetic peptide
YDSSPSW

SEQ ID NO: 840 - protein, 8 aa, Artificial Sequence
  Description of Artificial Sequence: Synthetic peptide
SQSLSSNF

SEQ ID NO: 841 - protein, 3 aa, Artificial Sequence
  Description of Artificial Sequence: Synthetic peptide
GAS

SEQ ID NO: 842 - protein, 7 aa, Artificial Sequence
  Description of Artificial Sequence: Synthetic peptide
YGTSPMY

SEQ ID NO: 843 - protein, 12 aa, Artificial Sequence
  Description of Artificial Sequence: Synthetic peptide
SQSLLHSNGYNY

SEQ ID NO: 844 - protein, 3 aa, Artificial Sequence
  Description of Artificial Sequence: Synthetic peptide
LGS

SEQ ID NO: 845 - protein, 6 aa, Artificial Sequence
  Description of Artificial Sequence: Synthetic peptide
ALQTPL

SEQ ID NO: 846 - protein, 8 aa, Artificial Sequence
  Description of Artificial Sequence: Synthetic peptide
SQSVSSSY

SEQ ID NO: 847 - protein, 3 aa, Artificial Sequence
  Description of Artificial Sequence: Synthetic peptide
GTS

SEQ ID NO: 848 - protein, 8 aa, Artificial Sequence
  Description of Artificial Sequence: Synthetic peptide
YGNSPPKF

SEQ ID NO: 849 - protein, 8 aa, Artificial Sequence
  Description of Artificial Sequence: Synthetic peptide
SQSVASSF

SEQ ID NO: 850 - protein, 3 aa, Artificial Sequence
  Description of Artificial Sequence: Synthetic peptide
GAS

SEQ ID NO: 851 - protein, 7 aa, Artificial Sequence
  Description of Artificial Sequence: Synthetic peptide
YGGSPRL

SEQ ID NO: 852 - protein, 7 aa, Artificial Sequence
  Description of Artificial Sequence: Synthetic peptide
SQDVNTA

SEQ ID NO: 853 - protein, 3 aa, Artificial Sequence
  Description of Artificial Sequence: Synthetic peptide
SAS

SEQ ID NO: 854 - protein, 6 aa, Artificial Sequence
  Description of Artificial Sequence: Synthetic peptide
HYSTPW

SEQ ID NO: 855 - protein, 11 aa, Artificial Sequence
  Description of Artificial Sequence: Synthetic peptide
SESVSVIGAHL

SEQ ID NO: 856 - protein, 3 aa, Artificial Sequence
  Description of Artificial Sequence: Synthetic peptide
LAS

SEQ ID NO: 857 - protein, 6 aa, Artificial Sequence
  Description of Artificial Sequence: Synthetic peptide
SRIFPR

SEQ ID NO: 858 - protein, 11 aa, Artificial Sequence
  Description of Artificial Sequence: Synthetic peptide
SESVTILGSHL

SEQ ID NO: 859 - protein, 3 aa, Artificial Sequence
  Description of Artificial Sequence: Synthetic peptide
LAS

SEQ ID NO: 860 - protein, 6 aa, Artificial Sequence
  Description of Artificial Sequence: Synthetic peptide
SRTIPR

SEQ ID NO: 861 - protein, 11 aa, Artificial Sequence
  Description of Artificial Sequence: Synthetic peptide
SESVTILGSHL

SEQ ID NO: 862 - protein, 3 aa, Artificial Sequence
  Description of Artificial Sequence: Synthetic peptide
LAS

SEQ ID NO: 863-962 - skipped (100 entries)

SEQ ID NO: 963 - protein, 6 aa, Artificial Sequence
  Description of Artificial Sequence: Synthetic peptide
SRTIPR

SEQ ID NO: 964 - protein, 10 aa, Artificial Sequence
  Description of Artificial Sequence: Synthetic peptide
GFALSNHGMS

SEQ ID NO: 965 - protein, 16 aa, Artificial Sequence
  Description of Artificial Sequence: Synthetic peptide
GIVYSGSTYYAASVKG

SEQ ID NO: 966 - protein, 7 aa, Artificial Sequence
  Description of Artificial Sequence: Synthetic peptide
HGGESDV

SEQ ID NO: 967 - protein, 10 aa, Artificial Sequence
  Description of Artificial Sequence: Synthetic peptide
GFTFSNYAMS

SEQ ID NO: 968 - protein, 17 aa, Artificial Sequence
  Description of Artificial Sequence: Synthetic peptide
GISRSGENTYYADSVKG

SEQ ID NO: 969 - protein, 11 aa, Artificial Sequence
  Description of Artificial Sequence: Synthetic peptide
SPAHYYGGMDV

SEQ ID NO: 970 - protein, 10 aa, Artificial Sequence
  Description of Artificial Sequence: Synthetic peptide
GFTFDDYAMH

SEQ ID NO: 971 - protein, 17 aa, Artificial Sequence
  Description of Artificial Sequence: Synthetic peptide
GISWNSGSIGYADSVKG

SEQ ID NO: 972 - protein, 6 aa, Artificial Sequence
  Description of Artificial Sequence: Synthetic peptide
HSFLAY

SEQ ID NO: 973 - protein, 10 aa, Artificial Sequence
  Description of Artificial Sequence: Synthetic peptide
GFALSNHGMS

SEQ ID NO: 974 - protein, 16 aa, Artificial Sequence
  Description of Artificial Sequence: Synthetic peptide
GIVYSGSTYYAASVKG

SEQ ID NO: 975 - protein, 7 aa, Artificial Sequence
  Description of Artificial Sequence: Synthetic peptide
HGGESDV

SEQ ID NO: 976 - protein, 10 aa, Artificial Sequence
  Description of Artificial Sequence: Synthetic peptide
GYIFDNFGIN

SEQ ID NO: 977 - skipped

SEQ ID NO: 978 - protein, 17 aa, Artificial Sequence
  Description of Artificial Sequence: Synthetic peptide
WINPKNNNTNYAQKFQG

SEQ ID NO: 979 - protein, 11 aa, Artificial Sequence
  Description of Artificial Sequence: Synthetic peptide
GPYYYQSYMDV

SEQ ID NO: 980 - protein, 10 aa, Artificial Sequence
  Description of Artificial Sequence: Synthetic peptide
GFTFSSDAMT

SEQ ID NO: 981 - protein, 17 aa, Artificial Sequence
  Description of Artificial Sequence: Synthetic peptide
VISGSGGTTYYADSVKG

SEQ ID NO: 982 - protein, 14 aa, Artificial Sequence
  Description of Artificial Sequence: Synthetic peptide
LDSSGYYYARGPRY

SEQ ID NO: 983 - protein, 10 aa, Artificial Sequence
  Description of Artificial Sequence: Synthetic peptide
GYTFSNYGIT

SEQ ID NO: 984 - protein, 17 aa, Artificial Sequence
  Description of Artificial Sequence: Synthetic peptide
WISAYNGNTNYAQKFQG

SEQ ID NO: 985 - protein, 9 aa, Artificial Sequence
  Description of Artificial Sequence: Synthetic peptide
GPYYYYMDV

SEQ ID NO: 986 - protein, 10 aa, Artificial Sequence
  Description of Artificial Sequence: Synthetic peptide
GFALSNHGMS

SEQ ID NO: 987 - protein, 16 aa, Artificial Sequence
  Description of Artificial Sequence: Synthetic peptide
GIVYSGSTYYAASVKG

SEQ ID NO: 988 - protein, 7 aa, Artificial Sequence
  Description of Artificial Sequence: Synthetic peptide
HGGESDV

SEQ ID NO: 989 - protein, 10 aa, Artificial Sequence
  Description of Artificial Sequence: Synthetic peptide
GFALSNHGMS

SEQ ID NO: 990 - protein, 16 aa, Artificial Sequence
  Description of Artificial Sequence: Synthetic peptide
GIVYSGSTYYAASVKG

SEQ ID NO: 991 - protein, 7 aa, Artificial Sequence
  Description of Artificial Sequence: Synthetic peptide
HGGESDV

SEQ ID NO: 992 - protein, 10 aa, Artificial Sequence
  Description of Artificial Sequence: Synthetic peptide
GFALSNHGMS

SEQ ID NO: 993 - protein, 16 aa, Artificial Sequence
  Description of Artificial Sequence: Synthetic peptide
GIVYSGSTYYAASVKG

SEQ ID NO: 994 - protein, 7 aa, Artificial Sequence
  Description of Artificial Sequence: Synthetic peptide
HGGESDV

SEQ ID NO: 995 - protein, 10 aa, Artificial Sequence
  Description of Artificial Sequence: Synthetic peptide
GFTFSDYYMS

SEQ ID NO: 996 - protein, 17 aa, Artificial Sequence
  Description of Artificial Sequence: Synthetic peptide
YISSSGSTIYYADSVKG

SEQ ID NO: 997 - protein, 8 aa, Artificial Sequence
  Description of Artificial Sequence: Synthetic peptide
ESGDGMDV

SEQ ID NO: 998 - protein, 10 aa, Artificial Sequence
  Description of Artificial Sequence: Synthetic peptide
GFTFSDYYMS

SEQ ID NO: 999 - protein, 17 aa, Artificial Sequence
  Description of Artificial Sequence: Synthetic peptide
YISSSGNTIYYADSVKG

SEQ ID NO: 1000 - protein, 8 aa, Artificial Sequence
  Description of Artificial Sequence: Synthetic peptide
STMVREDY

SEQ ID NO: 1001 - protein, 10 aa, Artificial Sequence
  Description of Artificial Sequence: Synthetic peptide
GFALSNHGMS

SEQ ID NO: 1002 - protein, 16 aa, Artificial Sequence
  Description of Artificial Sequence: Synthetic peptide
GIVYSGSTYYAASVKG

SEQ ID NO: 1003 - protein, 7 aa, Artificial Sequence
  Description of Artificial Sequence: Synthetic peptide
HGGESDV

SEQ ID NO: 1004 - protein, 10 aa, Artificial Sequence
  Description of Artificial Sequence: Synthetic peptide
GFALSNHGMS

SEQ ID NO: 1005 - protein, 16 aa, Artificial Sequence
  Description of Artificial Sequence: Synthetic peptide
GIVYSGSTYYAASVKG

SEQ ID NO: 1006 - protein, 7 aa, Artificial Sequence
  Description of Artificial Sequence: Synthetic peptide
HGGESDV

SEQ ID NO: 1007 - protein, 10 aa, Artificial Sequence
  Description of Artificial Sequence: Synthetic peptide
GFALSNHGMS

SEQ ID NO: 1008 - protein, 16 aa, Artificial Sequence
  Description of Artificial Sequence: Synthetic peptide
GIVYSGSTYYAASVKG

SEQ ID NO: 1009 - protein, 7 aa, Artificial Sequence
  Description of Artificial Sequence: Synthetic peptide
HGGESDV

SEQ ID NO: 1010 - protein, 12 aa, Artificial Sequence
  Description of Artificial Sequence: Synthetic peptide
GGSISSSYYYWG

SEQ ID NO: 1011 - protein, 16 aa, Artificial Sequence
  Description of Artificial Sequence: Synthetic peptide
SIYYSGSAYYNPSLKS

SEQ ID NO: 1012 - protein, 11 aa, Artificial Sequence
  Description of Artificial Sequence: Synthetic peptide
HWQEWPDAFDI

SEQ ID NO: 1013 - protein, 12 aa, Artificial Sequence
  Description of Artificial Sequence: Synthetic peptide
GFSLRTSGMCVS

SEQ ID NO: 1014 - protein, 16 aa, Artificial Sequence
  Description of Artificial Sequence: Synthetic peptide
RIDWDEDKFYSTSLKT

SEQ ID NO: 1015 - protein, 13 aa, Artificial Sequence
  Description of Artificial Sequence: Synthetic peptide
SGAGGTSATAFDI

SEQ ID NO: 1016 - protein, 10 aa, Artificial Sequence
  Description of Artificial Sequence: Synthetic peptide
GFTFSSYSMN

SEQ ID NO: 1017 - protein, 17 aa, Artificial Sequence
  Description of Artificial Sequence: Synthetic peptide
SISSSSSYIYYADSVKG

SEQ ID NO: 1018 - protein, 10 aa, Artificial Sequence
  Description of Artificial Sequence: Synthetic peptide
TIAAVYAFDI

SEQ ID NO: 1019 - protein, 10 aa, Artificial Sequence
  Description of Artificial Sequence: Synthetic peptide
GFTFSDYYMS

SEQ ID NO: 1020 - protein, 17 aa, Artificial Sequence
  Description of Artificial Sequence: Synthetic peptide
YISSSGSTIYYADSVKG

SEQ ID NO: 1021 - protein, 8 aa, Artificial Sequence
  Description of Artificial Sequence: Synthetic peptide
DLRGAFDI

SEQ ID NO: 1022 - protein, 10 aa, Artificial Sequence
  Description of Artificial Sequence: Synthetic peptide
GYTVTSHYIH

SEQ ID NO: 1023 - protein, 17 aa, Artificial Sequence
  Description of Artificial Sequence: Synthetic peptide
MINPSGGVTAYSQTLQG

SEQ ID NO: 1024 - protein, 11 aa, Artificial Sequence
  Description of Artificial Sequence: Synthetic peptide
EGSGSGWYFDF

SEQ ID NO: 1025 - protein, 12 aa, Artificial Sequence
  Description of Artificial Sequence: Synthetic peptide
GGSISSGGYYWS

SEQ ID NO: 1026 - protein, 16 aa, Artificial Sequence
  Description of Artificial Sequence: Synthetic peptide
YIYYSGSTYYNPSLKS

SEQ ID NO: 1027 - protein, 13 aa, Artificial Sequence
  Description of Artificial Sequence: Synthetic peptide
AGIAARLRGAFDI

SEQ ID NO: 1028 - protein, 10 aa, Artificial Sequence
  Description of Artificial Sequence: Synthetic peptide
GGTFSSYAIS

SEQ ID NO: 1029 - protein, 17 aa, Artificial Sequence
  Description of Artificial Sequence: Synthetic peptide
GIIPIFGTANYAQKFQG

SEQ ID NO: 1030 - protein, 20 aa, Artificial Sequence
  Description of Artificial Sequence: Synthetic peptide
RGGYQLLRWDVGLLRSAFDI

SEQ ID NO: 1031 - protein, 12 aa, Artificial Sequence
  Description of Artificial Sequence: Synthetic peptide
GDSVSSNSAAWN

SEQ ID NO: 1032 - protein, 18 aa, Artificial Sequence
  Description of Artificial Sequence: Synthetic peptide
RTYYRSKWYSFYAISLKS

SEQ ID NO: 1033 - protein, 13 aa, Artificial Sequence
  Description of Artificial Sequence: Synthetic peptide
SSPEGLFLYWFDP

SEQ ID NO: 1034 - protein, 10 aa, Artificial Sequence
  Description of Artificial Sequence: Synthetic peptide
GFTFSSYAMS

SEQ ID NO: 1035 - protein, 17 aa, Artificial Sequence
  Description of Artificial Sequence: Synthetic peptide
AISGSGGSTYYADSVKG

SEQ ID NO: 1036 - protein, 9 aa, Artificial Sequence
  Description of Artificial Sequence: Synthetic peptide
VEGSGSLDY

SEQ ID NO: 1037 - protein, 10 aa, Artificial Sequence
  Description of Artificial Sequence: Synthetic peptide
GITFSRYPMS

SEQ ID NO: 1038 - protein, 17 aa, Artificial Sequence
  Description of Artificial Sequence: Synthetic peptide
GISDSGVSTYYADSAKG

SEQ ID NO: 1039 - protein, 9 aa, Artificial Sequence
  Description of Artificial Sequence: Synthetic peptide
RAGSEASDI

SEQ ID NO: 1040 - protein, 10 aa, Artificial Sequence
  Description of Artificial Sequence: Synthetic peptide
GFTFSSYAMS

SEQ ID NO: 1041 - protein, 17 aa, Artificial Sequence
  Description of Artificial Sequence: Synthetic peptide
AISGSGGSTYYADSVKG

SEQ ID NO: 1042 - protein, 15 aa, Artificial Sequence
  Description of Artificial Sequence: Synthetic peptide
ATYKRELRYYYGMDV

SEQ ID NO: 1043 - protein, 10 aa, Artificial Sequence
  Description of Artificial Sequence: Synthetic peptide
GFTFSSYAMS

SEQ ID NO: 1044 - protein, 17 aa, Artificial Sequence
  Description of Artificial Sequence: Synthetic peptide
AISGSGGSTYYADSVKG

SEQ ID NO: 1045 - protein, 15 aa, Artificial Sequence
  Description of Artificial Sequence: Synthetic peptide
ATYKRELRYYYGMDV

SEQ ID NO: 1046 - protein, 10 aa, Artificial Sequence
  Description of Artificial Sequence: Synthetic peptide
GFTFDDYAMH

SEQ ID NO: 1047 - protein, 17 aa, Artificial Sequence
  Description of Artificial Sequence: Synthetic peptide
GISWNSGSIGYADSVKG

SEQ ID NO: 1048 - protein, 8 aa, Artificial Sequence
  Description of Artificial Sequence: Synthetic peptide
VGKAVPDV

SEQ ID NO: 1049 - protein, 10 aa, Artificial Sequence
  Description of Artificial Sequence: Synthetic peptide
GFTFDDYAMH

SEQ ID NO: 1050 - protein, 17 aa, Artificial Sequence
  Description of Artificial Sequence: Synthetic peptide
SINWKGNSLAYGDSVKG

SEQ ID NO: 1051 - protein, 13 aa, Artificial Sequence
  Description of Artificial Sequence: Synthetic peptide
HQGVAYYNYAMDV

SEQ ID NO: 1052 - protein, 10 aa, Artificial Sequence
  Description of Artificial Sequence: Synthetic peptide
GFTFSSYAMS

SEQ ID NO: 1053 - protein, 17 aa, Artificial Sequence
  Description of Artificial Sequence: Synthetic peptide
AISGSGGSTYYADSVKG

SEQ ID NO: 1054 - protein, 8 aa, Artificial Sequence
  Description of Artificial Sequence: Synthetic peptide
VVRDGMDV

SEQ ID NO: 1055 - protein, 10 aa, Artificial Sequence
  Description of Artificial Sequence: Synthetic peptide
GFTFSSYAMS

SEQ ID NO: 1056 - protein, 17 aa, Artificial Sequence
  Description of Artificial Sequence: Synthetic peptide
AISGSGGSTYYADSVKG

SEQ ID NO: 1057 - protein, 9 aa, Artificial Sequence
  Description of Artificial Sequence: Synthetic peptide
IPQTGTFDY

SEQ ID NO: 1058 - protein, 10 aa, Artificial Sequence
  Description of Artificial Sequence: Synthetic peptide
GFTFSSYAMS

SEQ ID NO: 1059 - protein, 17 aa, Artificial Sequence
  Description of Artificial Sequence: Synthetic peptide
AISGSGGSTYYADSVKG

SEQ ID NO: 1060 - protein, 15 aa, Artificial Sequence
  Description of Artificial Sequence: Synthetic peptide
ANYKRELRYYYGMDV

SEQ ID NO: 1061 - protein, 10 aa, Artificial Sequence
  Description of Artificial Sequence: Synthetic peptide
GFSFSSYAMS

SEQ ID NO: 1062 - protein, 17 aa, Artificial Sequence
  Description of Artificial Sequence: Synthetic peptide
AISGSGGSTYYADSVKG

SEQ ID NO: 1063 - protein, 11 aa, Artificial Sequence
  Description of Artificial Sequence: Synthetic peptide
ALVGATGAFDI

SEQ ID NO: 1064 - protein, 10 aa, Artificial Sequence
  Description of Artificial Sequence: Synthetic peptide
GFTFSSYAMS

SEQ ID NO: 1065 - protein, 17 aa, Artificial Sequence
  Description of Artificial Sequence: Synthetic peptide
AISGSGGSTYYADSVKG

SEQ ID NO: 1066 - protein, 8 aa, Artificial Sequence
  Description of Artificial Sequence: Synthetic peptide
WFGEGFDP

SEQ ID NO: 1067 - protein, 10 aa, Artificial Sequence
  Description of Artificial Sequence: Synthetic peptide
GFTFSSYAMS

SEQ ID NO: 1068 - protein, 17 aa, Artificial Sequence
  Description of Artificial Sequence: Synthetic peptide
AISGSGGSTYYADSVKG

SEQ ID NO: 1069 - protein, 17 aa, Artificial Sequence
  Description of Artificial Sequence: Synthetic peptide
VGYDSSGYYRDYYGMDV

SEQ ID NO: 1070 - protein, 10 aa, Artificial Sequence
  Description of Artificial Sequence: Synthetic peptide
GFTFSSYAMS

SEQ ID NO: 1071 - protein, 17 aa, Artificial Sequence
  Description of Artificial Sequence: Synthetic peptide
AISGSGGSTYYADSVKG

SEQ ID NO: 1072 - protein, 13 aa, Artificial Sequence
  Description of Artificial Sequence: Synthetic peptide
MGWSSGYLGAFDI

SEQ ID NO: 1073 - protein, 10 aa, Artificial Sequence
  Description of Artificial Sequence: Synthetic peptide
GYTFTNFGMN

SEQ ID NO: 1074 - protein, 17 aa, Artificial Sequence
  Description of Artificial Sequence: Synthetic peptide
WINTYTGESYFADDFKG

SEQ ID NO: 1075 - protein, 13 aa, Artificial Sequence
  Description of Artificial Sequence: Synthetic peptide
GEIYYGYDGGFAY

SEQ ID NO: 1076 - protein, 10 aa, Artificial Sequence
  Description of Artificial Sequence: Synthetic peptide
GYTFTDYSIN

SEQ ID NO: 1077 - skipped

SEQ ID NO: 1078 - protein, 17 aa, Artificial Sequence
  Description of Artificial Sequence: Synthetic peptide
WINTETREPAYAYDFRG

SEQ ID NO: 1079 - protein, 8 aa, Artificial Sequence
  Description of Artificial Sequence: Synthetic peptide
DYSYAMDY

SEQ ID NO: 1080 - protein, 10 aa, Artificial Sequence
  Description of Artificial Sequence: Synthetic peptide
GYTFRHYSMN

SEQ ID NO: 1081 - protein, 17 aa, Artificial Sequence
  Description of Artificial Sequence: Synthetic peptide
RINTESGVPIYADDFKG

SEQ ID NO: 1082 - protein, 8 aa, Artificial Sequence
  Description of Artificial Sequence: Synthetic peptide
DYLYSLDF

SEQ ID NO: 1083 - protein, 10 aa, Artificial Sequence
  Description of Artificial Sequence: Synthetic peptide
GYTFTHYSMN

SEQ ID NO: 1084 - protein, 17 aa, Artificial Sequence
  Description of Artificial Sequence: Synthetic peptide
RINTETGEPLYADDFKG

SEQ ID NO: 1085 - protein, 8 aa, Artificial Sequence
  Description of Artificial Sequence: Synthetic peptide
DYLYSCDY

SEQ ID NO: 1086 - protein, 11 aa, Artificial Sequence
  Description of Artificial Sequence: Synthetic peptide
RASQSISSYLN

SEQ ID NO: 1087 - protein, 7 aa, Artificial Sequence
  Description of Artificial Sequence: Synthetic peptide
AASSLQS

SEQ ID NO: 1088 - protein, 9 aa, Artificial Sequence
  Description of Artificial Sequence: Synthetic peptide
QQSYSTPYT

SEQ ID NO: 1089 - protein, 12 aa, Artificial Sequence
  Description of Artificial Sequence: Synthetic peptide
RASQSISSSFLA

SEQ ID NO: 1090 - protein, 7 aa, Artificial Sequence
  Description of Artificial Sequence: Synthetic peptide
GASRRAT

SEQ ID NO: 1091 - protein, 10 aa, Artificial Sequence
  Description of Artificial Sequence: Synthetic peptide
QQYHSSPSWT

SEQ ID NO: 1092 - protein, 16 aa, Artificial Sequence
  Description of Artificial Sequence: Synthetic peptide
RSSQSLLHSNGYNYLD

SEQ ID NO: 1093 - protein, 7 aa, Artificial Sequence
  Description of Artificial Sequence: Synthetic peptide
LGSNRAS

SEQ ID NO: 1094 - protein, 9 aa, Artificial Sequence
  Description of Artificial Sequence: Synthetic peptide
MQALQTPYT

SEQ ID NO: 1095 - protein, 16 aa, Artificial Sequence
  Description of Artificial Sequence: Synthetic peptide
KSSQSLLRNDGKTPLY

SEQ ID NO: 1096 - protein, 7 aa, Artificial Sequence
  Description of Artificial Sequence: Synthetic peptide
EVSNRFS

SEQ ID NO: 1097 - protein, 8 aa, Artificial Sequence
  Description of Artificial Sequence: Synthetic peptide
MQNIQFPS

SEQ ID NO: 1098 - protein, 16 aa, Artificial Sequence
  Description of Artificial Sequence: Synthetic peptide
RSSQSLLHSNGYNYLN

SEQ ID NO: 1099 - protein, 7 aa, Artificial Sequence
  Description of Artificial Sequence: Synthetic peptide
LGSKRAS

SEQ ID NO: 1100 - protein, 9 aa, Artificial Sequence
  Description of Artificial Sequence: Synthetic peptide
MQALQTPYT

SEQ ID NO: 1101 - protein, 11 aa, Artificial Sequence
  Description of Artificial Sequence: Synthetic peptide
RASQSISSYLN

SEQ ID NO: 1102 - protein, 7 aa, Artificial Sequence
  Description of Artificial Sequence: Synthetic peptide
GASTLAS

SEQ ID NO: 1103 - protein, 8 aa, Artificial Sequence
  Description of Artificial Sequence: Synthetic peptide
QQSYKRAS

SEQ ID NO: 1104 - protein, 16 aa, Artificial Sequence
  Description of Artificial Sequence: Synthetic peptide
RSSQSLLYSNGYNYVD

SEQ ID NO: 1105 - protein, 7 aa, Artificial Sequence
  Description of Artificial Sequence: Synthetic peptide
LGSNRAS

SEQ ID NO: 1106 - protein, 9 aa, Artificial Sequence
  Description of Artificial Sequence: Synthetic peptide
MQGRQFPYS

SEQ ID NO: 1107 - protein, 11 aa, Artificial Sequence
  Description of Artificial Sequence: Synthetic peptide
RASQSVSSNLA

SEQ ID NO: 1108 - protein, 7 aa, Artificial Sequence
  Description of Artificial Sequence: Synthetic peptide
GASTRAS

SEQ ID NO: 1109 - protein, 8 aa, Artificial Sequence
  Description of Artificial Sequence: Synthetic peptide
QQYGSSLT

SEQ ID NO: 1110 - protein, 11 aa, Artificial Sequence
  Description of Artificial Sequence: Synthetic peptide
RASQSVSSKLA

SEQ ID NO: 1111 - protein, 7 aa, Artificial Sequence
  Description of Artificial Sequence: Synthetic peptide
GASIRAT

SEQ ID NO: 1112 - protein, 9 aa, Artificial Sequence
  Description of Artificial Sequence: Synthetic peptide
QQYGSSSWT

SEQ ID NO: 1113 - protein, 12 aa, Artificial Sequence
  Description of Artificial Sequence: Synthetic peptide
RASQSVGSTNLA

SEQ ID NO: 1114 - protein, 7 aa, Artificial Sequence
  Description of Artificial Sequence: Synthetic peptide
DASNRAT

SEQ ID NO: 1115 - protein, 10 aa, Artificial Sequence
  Description of Artificial Sequence: Synthetic peptide
QQYGSSPPWT

SEQ ID NO: 1116 - protein, 11 aa, Artificial Sequence
  Description of Artificial Sequence: Synthetic peptide
RASQSISSYLN

SEQ ID NO: 1117 - protein, 7 aa, Artificial Sequence
  Description of Artificial Sequence: Synthetic peptide
AASSLQS

SEQ ID NO: 1118 - protein, 7 aa, Artificial Sequence
  Description of Artificial Sequence: Synthetic peptide
QQSYTLA

SEQ ID NO: 1119 - protein, 16 aa, Artificial Sequence
  Description of Artificial Sequence: Synthetic peptide
KSSESLVHNSGKTYLN

SEQ ID NO: 1120 - protein, 7 aa, Artificial Sequence
  Description of Artificial Sequence: Synthetic peptide
EVSNRDS

SEQ ID NO: 1121 - protein, 9 aa, Artificial Sequence
  Description of Artificial Sequence: Synthetic peptide
MQGTHWPGT

SEQ ID NO: 1122 - protein, 11 aa, Artificial Sequence
  Description of Artificial Sequence: Synthetic peptide
QASEDINKFLN

SEQ ID NO: 1123 - protein, 7 aa, Artificial Sequence
  Description of Artificial Sequence: Synthetic peptide
DASTLQT

SEQ ID NO: 1124 - protein, 9 aa, Artificial Sequence
  Description of Artificial Sequence: Synthetic peptide
QQYESLPLT

SEQ ID NO: 1125 - protein, 11 aa, Artificial Sequence
  Description of Artificial Sequence: Synthetic peptide
RASQSVGSNLA

SEQ ID NO: 1126 - protein, 7 aa, Artificial Sequence
  Description of Artificial Sequence: Synthetic peptide
GASTRAT

SEQ ID NO: 1127 - protein, 10 aa, Artificial Sequence
  Description of Artificial Sequence: Synthetic peptide
QQYNDWLPVT

SEQ ID NO: 1128 - protein, 12 aa, Artificial Sequence
  Description of Artificial Sequence: Synthetic peptide
RASQSIGSSSLA

SEQ ID NO: 1129 - protein, 7 aa, Artificial Sequence
  Description of Artificial Sequence: Synthetic peptide
GASSRAS

SEQ ID NO: 1130 - protein, 10 aa, Artificial Sequence
  Description of Artificial Sequence: Synthetic peptide
QQYAGSPPFT

SEQ ID NO: 1131 - protein, 11 aa, Artificial Sequence
  Description of Artificial Sequence: Synthetic peptide
KASQDIDDAMN

SEQ ID NO: 1132 - protein, 7 aa, Artificial Sequence
  Description of Artificial Sequence: Synthetic peptide
SATSPVP

SEQ ID NO: 1133 - protein, 9 aa, Artificial Sequence
  Description of Artificial Sequence: Synthetic peptide
LQHDNFPLT

SEQ ID NO: 1134 - protein, 11 aa, Artificial Sequence
  Description of Artificial Sequence: Synthetic peptide
RASQDIYNNLA

SEQ ID NO: 1135 - protein, 7 aa, Artificial Sequence
  Description of Artificial Sequence: Synthetic peptide
AANKSQS

SEQ ID NO: 1136 - protein, 9 aa, Artificial Sequence
  Description of Artificial Sequence: Synthetic peptide
QHYYRFPYS

SEQ ID NO: 1137 - protein, 16 aa, Artificial Sequence
  Description of Artificial Sequence: Synthetic peptide
RSSQSLLHSNGYNYLD

SEQ ID NO: 1138 - protein, 7 aa, Artificial Sequence
  Description of Artificial Sequence: Synthetic peptide
LGSNRAS

SEQ ID NO: 1139 - protein, 9 aa, Artificial Sequence
  Description of Artificial Sequence: Synthetic peptide
MQALQTPYT

SEQ ID NO: 1140 - protein, 11 aa, Artificial Sequence
  Description of Artificial Sequence: Synthetic peptide
GGNNIGTKSVH

SEQ ID NO: 1141 - protein, 7 aa, Artificial Sequence
  Description of Artificial Sequence: Synthetic peptide
DDSVRPS

SEQ ID NO: 1142 - protein, 11 aa, Artificial Sequence
  Description of Artificial Sequence: Synthetic peptide
QVWDSDSEHVV

SEQ ID NO: 1143 - protein, 11 aa, Artificial Sequence
  Description of Artificial Sequence: Synthetic peptide
SGDGLSKKYVS

SEQ ID NO: 1144 - protein, 7 aa, Artificial Sequence
  Description of Artificial Sequence: Synthetic peptide
RDKERPS

SEQ ID NO: 1145 - protein, 9 aa, Artificial Sequence
  Description of Artificial Sequence: Synthetic peptide
QAWDDTTVV

SEQ ID NO: 1146 - protein, 11 aa, Artificial Sequence
  Description of Artificial Sequence: Synthetic peptide
RASQGIRNWLA

SEQ ID NO: 1147 - protein, 7 aa, Artificial Sequence
  Description of Artificial Sequence: Synthetic peptide
AASNLQS

SEQ ID NO: 1148 - protein, 9 aa, Artificial Sequence
  Description of Artificial Sequence: Synthetic peptide
QKYNSAPFT

SEQ ID NO: 1149 - protein, 11 aa, Artificial Sequence
  Description of Artificial Sequence: Synthetic peptide
GGNNIGSKSVH

SEQ ID NO: 1150 - protein, 7 aa, Artificial Sequence
  Description of Artificial Sequence: Synthetic peptide
GKNNRPS

SEQ ID NO: 1151 - protein, 12 aa, Artificial Sequence
  Description of Artificial Sequence: Synthetic peptide
SSRDSSGDHLRV

SEQ ID NO: 1152 - protein, 11 aa, Artificial Sequence
  Description of Artificial Sequence: Synthetic peptide
QGDSLGNYYAT

SEQ ID NO: 1153 - protein, 7 aa, Artificial Sequence
  Description of Artificial Sequence: Synthetic peptide
GTNNRPS

SEQ ID NO: 1154 - protein, 11 aa, Artificial Sequence
  Description of Artificial Sequence: Synthetic peptide
NSRDSSGHHLL

SEQ ID NO: 1155 - protein, 12 aa, Artificial Sequence
  Description of Artificial Sequence: Synthetic peptide
RASQSVSSAYLA

SEQ ID NO: 1156 - protein, 7 aa, Artificial Sequence
  Description of Artificial Sequence: Synthetic peptide
GASTRAT

SEQ ID NO: 1157 - protein, 14 aa, Artificial Sequence
  Description of Artificial Sequence: Synthetic peptide
QHYGSSFNGSSLFT

SEQ ID NO: 1158 - protein, 11 aa, Artificial Sequence
  Description of Artificial Sequence: Synthetic peptide
RASQSVSNSLA

SEQ ID NO: 1159 - protein, 7 aa, Artificial Sequence
  Description of Artificial Sequence: Synthetic peptide
DASSRAT

SEQ ID NO: 1160 - protein, 12 aa, Artificial Sequence
  Description of Artificial Sequence: Synthetic peptide
RASQSVSTTFLA

SEQ ID NO: 1161 - protein, 7 aa, Artificial Sequence
  Description of Artificial Sequence: Synthetic peptide
GSSNRAT

SEQ ID NO: 1162 - protein, 10 aa, Artificial Sequence
  Description of Artificial Sequence: Synthetic peptide
QQYHSSPSWT

SEQ ID NO: 1163 - protein, 11 aa, Artificial Sequence
  Description of Artificial Sequence: Synthetic peptide
RASQSISSYLN

SEQ ID NO: 1164 - protein, 7 aa, Artificial Sequence
  Description of Artificial Sequence: Synthetic peptide
AASSLQS

SEQ ID NO: 1165 - protein, 9 aa, Artificial Sequence
  Description of Artificial Sequence: Synthetic peptide
QQSYSTPYS

SEQ ID NO: 1166 - protein, 12 aa, Artificial Sequence
  Description of Artificial Sequence: Synthetic peptide
RATQSIGSSFLA

SEQ ID NO: 1167 - protein, 7 aa, Artificial Sequence
  Description of Artificial Sequence: Synthetic peptide
GASQRAT

SEQ ID NO: 1168 - protein, 10 aa, Artificial Sequence
  Description of Artificial Sequence: Synthetic peptide
QHYESSPSWT

SEQ ID NO: 1169 - protein, 12 aa, Artificial Sequence
  Description of Artificial Sequence: Synthetic peptide
RASQSVSSSYLA

SEQ ID NO: 1170 - protein, 7 aa, Artificial Sequence
  Description of Artificial Sequence: Synthetic peptide
GASSRAT

SEQ ID NO: 1171 - protein, 10 aa, Artificial Sequence
  Description of Artificial Sequence: Synthetic peptide
QQYGSPPRFT

SEQ ID NO: 1172 - protein, 12 aa, Artificial Sequence
  Description of Artificial Sequence: Synthetic peptide
RASQSVSSSYLA

SEQ ID NO: 1173 - protein, 7 aa, Artificial Sequence
  Description of Artificial Sequence: Synthetic peptide
GASSRAT

SEQ ID NO: 1174 - protein, 10 aa, Artificial Sequence
  Description of Artificial Sequence: Synthetic peptide
QHYGSSPSWT

SEQ ID NO: 1175 - protein, 12 aa, Artificial Sequence
  Description of Artificial Sequence: Synthetic peptide
RASQRVASNYLA

SEQ ID NO: 1176 - protein, 7 aa, Artificial Sequence
  Description of Artificial Sequence: Synthetic peptide
GASSRAT

SEQ ID NO: 1177 - skipped

SEQ ID NO: 1178 - protein, 10 aa, Artificial Sequence
  Description of Artificial Sequence: Synthetic peptide
QHYDSSPSWT

SEQ ID NO: 1179 - protein, 12 aa, Artificial Sequence
  Description of Artificial Sequence: Synthetic peptide
RASQSLSSNFLA

SEQ ID NO: 1180 - protein, 7 aa, Artificial Sequence
  Description of Artificial Sequence: Synthetic peptide
GASNWAT

SEQ ID NO: 1181 - protein, 10 aa, Artificial Sequence
  Description of Artificial Sequence: Synthetic peptide
QYYGTSPMYT

SEQ ID NO: 1182 - protein, 16 aa, Artificial Sequence
  Description of Artificial Sequence: Synthetic peptide
RSSQSLLHSNGYNYLD

SEQ ID NO: 1183 - protein, 7 aa, Artificial Sequence
  Description of Artificial Sequence: Synthetic peptide
LGSNRAS

SEQ ID NO: 1184 - protein, 9 aa, Artificial Sequence
  Description of Artificial Sequence: Synthetic peptide
MQALQTPLT

SEQ ID NO: 1185 - protein, 12 aa, Artificial Sequence
  Description of Artificial Sequence: Synthetic peptide
RASQSVSSSYLA

SEQ ID NO: 1186 - protein, 7 aa, Artificial Sequence
  Description of Artificial Sequence: Synthetic peptide
GTSSRAT

SEQ ID NO: 1187 - protein, 11 aa, Artificial Sequence
  Description of Artificial Sequence: Synthetic peptide
QHYGNSPPKFT

SEQ ID NO: 1188 - skipped

SEQ ID NO: 1189 - protein, 12 aa, Artificial Sequence
  Description of Artificial Sequence: Synthetic peptide
RASQSVASSFLA

SEQ ID NO: 1190 - protein, 7 aa, Artificial Sequence
  Description of Artificial Sequence: Synthetic peptide
GASGRAT

SEQ ID NO: 1191 - protein, 10 aa, Artificial Sequence
  Description of Artificial Sequence: Synthetic peptide
QHYGGSPRLT

SEQ ID NO: 1192 - protein, 11 aa, Artificial Sequence
  Description of Artificial Sequence: Synthetic peptide
RASQDVNTAVS

SEQ ID NO: 1193 - protein, 7 aa, Artificial Sequence
  Description of Artificial Sequence: Synthetic peptide
SASYRYT

SEQ ID NO: 1194 - protein, 9 aa, Artificial Sequence
  Description of Artificial Sequence: Synthetic peptide
QQHYSTPWT

SEQ ID NO: 1195 - protein, 15 aa, Artificial Sequence
  Description of Artificial Sequence: Synthetic peptide
RASESVSVIGAHLIH

SEQ ID NO: 1196 - protein, 7 aa, Artificial Sequence
  Description of Artificial Sequence: Synthetic peptide
LASNLET

SEQ ID NO: 1197 - protein, 9 aa, Artificial Sequence
  Description of Artificial Sequence: Synthetic peptide
LQSRIFPRT

SEQ ID NO: 1198 - protein, 15 aa, Artificial Sequence
  Description of Artificial Sequence: Synthetic peptide
RASESVTILGSHLIY

SEQ ID NO: 1199 - protein, 7 aa, Artificial Sequence
  Description of Artificial Sequence: Synthetic peptide
LASNVQT

SEQ ID NO: 1200 - protein, 9 aa, Artificial Sequence
  Description of Artificial Sequence: Synthetic peptide
LQSRTIPRT

SEQ ID NO: 1201 - protein, 15 aa, Artificial Sequence
  Description of Artificial Sequence: Synthetic peptide
RASESVTILGSHLIY

SEQ ID NO: 1202 - protein, 7 aa, Artificial Sequence
  Description of Artificial Sequence: Synthetic peptide
LASNVQT

SEQ ID NO: 1203 - protein, 9 aa, Artificial Sequence
  Description of Artificial Sequence: Synthetic peptide
LQSRTIPRT

SEQ ID NO: 1204 - protein, 4 aa, Artificial Sequence
  Description of Artificial Sequence: Synthetic peptide
RGDS

SEQ ID NO: 1205 - protein, 7 aa, Artificial Sequence
  Description of Artificial Sequence: Synthetic peptide
GASQRAT

SEQ ID NO: 1206 - protein, 10 aa, Artificial Sequence
  Description of Artificial Sequence: Synthetic peptide
QHYESSPSWT

SEQ ID NO: 1207 - protein, 12 aa, Artificial Sequence
  Description of Artificial Sequence: Synthetic peptide
RASQSVSSSYLA

SEQ ID NO: 1208 - protein, 7 aa, Artificial Sequence
  Description of Artificial Sequence: Synthetic peptide
GASSRAT

SEQ ID NO: 1209 - protein, 7 aa, Artificial Sequence
  Description of Artificial Sequence: Synthetic peptide
SEDINKF

SEQ ID NO: 1210 - protein, 3 aa, Artificial Sequence
  Description of Artificial Sequence: Synthetic peptide
DAS

SEQ ID NO: 1211 - protein, 6 aa, Artificial Sequence
  Description of Artificial Sequence: Synthetic peptide
YESLPL

SEQ ID NO: 1212 - protein, 7 aa, Artificial Sequence
  Description of Artificial Sequence: Synthetic peptide
SQSVGSN

SEQ ID NO: 1213 - protein, 3 aa, Artificial Sequence
  Description of Artificial Sequence: Synthetic peptide
GAS

SEQ ID NO: 1214 - protein, 7 aa, Artificial Sequence
  Description of Artificial Sequence: Synthetic peptide
YNDWLPV

SEQ ID NO: 1215 - protein, 8 aa, Artificial Sequence
  Description of Artificial Sequence: Synthetic peptide
SQSIGSSS

SEQ ID NO: 1216 - protein, 3 aa, Artificial Sequence
  Description of Artificial Sequence: Synthetic peptide
GAS

SEQ ID NO: 1217 - protein, 10 aa, Artificial Sequence
  Description of Artificial Sequence: Synthetic peptide
QQFGTSSGLT

SEQ ID NO: 1218 - protein, 12 aa, Artificial Sequence
  Description of Artificial Sequence: Synthetic peptide
RASQSVSSSFLA

SEQ ID NO: 1219 - protein, 7 aa, Artificial Sequence
  Description of Artificial Sequence: Synthetic peptide
GASSRAT

SEQ ID NO: 1220 - protein, 10 aa, Artificial Sequence
  Description of Artificial Sequence: Synthetic peptide
QQYHSSPSWT
